(19) United States
(12) Patent Application Publication
(10) Pub. No.: US 2012/0149634 A1
(43) Pub. Date: Jun. 14, 2012

(54) COMPOUNDS AND METHODS FOR TREATING BONE DISORDERS AND CONTROLLING WEIGHT

(76) Inventors: David R. Clemmons, Chapel Hill, NC (US); Clifford J. Rosen, Freeport, ME (US)

(21) Appl. No.: 13/375,562

(22) PCT Filed: Jun. 4, 2010
(86) PCT No.: PCT/US10/37390

§ 371 Date: Feb. 27, 2012

Related U.S. Application Data
(60) Provisional application No. 61/184,209, filed on Jun. 4, 2009.

(51) Int. Cl. A61K 38/10; C07K 7/06; A61K 38/08; C12N 5/02; A61P 19/02; A61P 19/10; A61P 3/04; C07K 7/08; A61P 19/08

(52) U.S. Cl. 514/4.8; 530/327; 514/21.5; 514/21.6; 514/16.7; 514/16.9; 435/375

(57) ABSTRACT

The present invention provides peptides and methods of their use in treating bone disorders and bone-related conditions and in treating obesity.

### STATEMENT OF PRIORITY

[0001] The present invention claims the benefit, under 35 U.S.C. §119(e), of U.S. Provisional Application Ser. No. 61/184,209, filed Jun. 4, 2009, the entire contents of which are incorporated by reference herein.

### STATEMENT OF GOVERNMENT SUPPORT

[0002] The present invention was funded in part by government support under Grant Nos. HL-56580 and AG-02331 from the National Institutes of Health. The United States Government has certain rights in this invention.

### FIELD OF THE INVENTION

[0003] The present invention concerns peptides, pharmaceutical formulations containing the same, and methods of use thereof in controlling weight, treating bone disorders and improving bone marrow reconstitution.

### BACKGROUND OF THE INVENTION

[0004] Insulin-like growth factor binding protein-2 (IGFBP-2) is a 36,000 dalton protein that is a member of the IGFBP family. There are six forms of high affinity IGF binding proteins. In addition to binding the insulin-like growth factors I and II and acting as transport proteins, these proteins have been shown to have some actions that are independent of their ability to bind to IGFs.

[0005] IGFBP-2 is the second most abundant binding protein in serum. It circulates in concentrations in humans that vary between 100-600 ng/ml. Protein concentrations are high during fetal life and at birth and fall progressively during childhood and adolescence. There is a slight rise, an approximately 25% increase that occurs between 60-80 years. Serum concentrations of IGFBP-2 are regulated by hormones and nutrients. Fasting causes a significant increase in IGFBP-2 and feeding (particularly feeding protein) restores concentrations to normal. Concentrations are also suppressed by administration of insulin or growth hormone, and are increased by insulin-like growth factor-I. This is probably due in part to suppression of growth hormone and insulin, both of which are suppressed by administering IGF-I.

[0006] Proteolytic cleavage of IGFBP-2 results in small fragments that include the heparin binding domain (HBD). A small molecule containing the HBD present in the linker region of IGFBP-2 has been synthesized. Of the two HBDs in this molecule, the one synthesized is unique to IGFBP-2 and is not represented in other IGFBPs.

[0007] The present invention overcomes previous shortcomings in the art by providing peptides of IFGBP-2 and methods of their use in treating bone disorders, controlling weight and improving bone marrow reconstitution.

### SUMMARY OF THE INVENTION

[0008] A first aspect of the invention is a compound comprising, consisting of or consisting essentially of the IGFBP-2 fragment KHHLGLEEPKKLR, KHHLGLEEPKK, HLGLEEPKKLR, analogs thereof, prodrug of any thereof, or pharmaceutically acceptable salts of any thereof (all hereinafter sometimes referred to as “active compounds” or “active agents”).

[0009] A second aspect of the invention is a composition comprising an active compound as described herein, which can be in combination with a pharmaceutically acceptable carrier, and optionally including at least one (e.g., 1, 2, 3, 4, 5, 6, 7, 8, 9, 10. etc.) additional active agent such as a bone resorption inhibitor or a weight control agent.

[0010] A further aspect of the invention is a method for inducing deposition and maturation of bone in a subject having a compromised bone condition, comprising administering the subject an active compound in an amount effective to induce deposition and maturation of bone in the subject. The method may further comprise concurrently administering a bone resorption inhibitor to the subject in an effective amount.

[0011] An additional aspect of the invention is a method for enhancing bone formation and inhibiting bone resorption simultaneously in a subject in need thereof, comprising administering to the subject an active compound in an amount effective to enhance bone formation and inhibit bone resorption simultaneously in said subject.

[0012] A further aspect of the invention is a method for controlling body weight in a subject in need thereof, comprising administering the subject an active compound as described herein in an amount effective to control body weight. The method may further comprise concurrently administering the subject an additional weight control agent.

[0013] Another aspect of the invention is a method for improving bone marrow reconstitution in a subject in need thereof, comprising administering to said subject an active compound of this invention in an amount effective to improve bone marrow reconstitution.

[0014] A further aspect of the invention is the use of an active compound as described herein for carrying out a method as described herein, and/or for the preparation of a medicament for carrying out a method as described herein.

[0015] The present invention is explained in greater detail below.

### BRIEF DESCRIPTION OF THE DRAWINGS

[0016] FIG. 1. The heparin-binding domain of IGFBP2 enhances osteoblastogenesis in vitro. a. Von Kossa staining was performed using tibia from 8 weeks old Igfbp2^{+/+} and Igfbp2^{-/-} male mouse. b. Calvarial osteoblasts (COBs) were harvested from day 7 old male Igfbp2^{+/+} and Igfbp2^{-/-} male mouse, and treated with osteogenic media in the presence of 2.5% FCS. At day 7, alkaline phosphatase (ALP) staining was performed. c and d. COBs and Bone marrow stromal cells (BMSCs) from Igfbp2^{-/-} mouse were treated with osteogenic media with pegylated heparin-binding domain peptide (PEG-HBD) in the presence of 10% FCS. ALP staining (day 7) and Alizarin Red staining (day 14) were performed (c). RNA was isolated at day 14 from BMSCs and expression of ALP, osteocalcin (OC) and Runx2 was analyzed by real-time PCR. Figures shown represent at least 3 independent experiments (n=3). Statistical difference was analyzed by student's t test. *; p<0.05.

[0017] FIG. 2. The heparin binding domain of IGFBP2 enhances periosteal expansion of metacarpals ex vivo. Metacarpals were collected from day 1 male mouse, and treated with osteogenic media with IGFBP2 (200 ng/ml) or the heparin-binding domain peptide (HBD-peptide) (2 μg/ml) in the presence or absence of IGF-1 (20 ng/ml) for 10 days. Bones were labeled with calcein (500 ng/ml) and calcein incorporated area was visualized (a) and longitudinal length of calcein incorporated area was quantified (b). Alcian blue and Von Kossa double staining was performed (c) and length and width of metacarpals were quantified (d). Statistical difference was analyzed by ANOVA followed by Bonferroni post-hoc test. Figures shown represent at least 3 independent experiments. Values are expressed as the mean±SEM (n=3-4). ^{a}; <0.05 vs PBS, ^{b}; <0.01 vs PBS, ^{c}; <0.001 vs PBS, ^{d}; <0.01 vs HBD, ^{e}; <0.05 vs IGF-I, ^{f}; <0.05 vs HBD.

[0018] FIG. 3. The heparin binding domain of IGFBP5 does not show any effect on in vitro osteoblastogenesis or periosteal expansion of metacarpals ex vivo. a. Primary calvarial osteoblasts were collected from male Igfbp2^{-/-} male mouse and treated with osteogenic media with or without the heparin-binding domain of IGFBP-5 (HBD-BP5) (2 μg/ml). Osteoblastogenesis was evaluated by Alizarin Red staining. b and c. Metacarpals were collected from day 1 male mouse, and treated with osteogenic media with or without HBD-BP5 (2 μg/ml) for 10 days. Bones were labeled with calcein (500 ng/ml) and calcein incorporated area was visualized (a). Longitudinal length of calcein incorporated area was quantified (b). Alcian blue and Von Kossa double staining was performed (c) and length and width of metacarpals were quantified (d). Figures shown represent at least 3 independent experiments. Values are expressed as the mean±SEM. Statistical difference was analyzed by Student's t-test (n=3-4).

[0019] FIG. 4. The heparin-binding domain of IGFBP2 partially rescues osteopenic phenotype of Igfbp2^{-/-} mice. Igfbp2^{-/-} mice were treated with PBS or pegylated heparin-binding domain (PEG-HBD) from 6 to 9 weeks of age. a. MicroCT image of distal femur. b. Parameters by three-point bending study were shown. c. Osteoblast number/bone perimeter (Nob/BPm), osteoblast surface/bone surface (ObS/BS), osteoclast number/bone parameter (Noc/BPm) and erosion surface/bone surface (ES/BS) were determined by histomorphometry (n=5). d. Adipocyte number (N.Ad) was counted just proximal to the distal growth plate of femur and normalized by the total area (T.Ar) (n=6). e. Igfbp2^{-/-} calvarial osteoblasts (COBs) were treated with PBS or PEG-HBD for 24 hours in serum-free media. Expression of Pparg was analyzed by real-time PCR (n=3). f. Serum levels of Trap5b were analyzed by ELISA (Immunodiagnostics Inc.) (n=6-9). g and h. Igfbp2^{-/-} COBs were treated with or without PEG-HBD for 2 hours (h). Igfbp2^{-/-} BMSCs were cultured with osteogenic media with PBS or PEG-HBD for 2 weeks (i). Expression of Opg and Rankl was analyzed by real-time PCR (n=3). Figures shown represent at least 3 independent experiments. Values are expressed as the mean±SEM. Statistical difference was analyzed by Student's t-test *; <0.001, **; <0.01, ^{†}; <0.05, ^{††}; <0.06.

[0020] FIG. 5. The heparin-binding domain of IGFBP2 suppresses PTEN expression. a and b, Igfbp2^{-/-} calvarial osteoblasts (COBs) were isolated, and treated with PBS, IGFBP-2 or pegylated heparin-binding domain peptide (PEG-HBD) in MEMα containing 0.1% BSA overnight. Whole cell lysate was collected and expression of PTEN and α-actin was analyzed by Western blot analysis. Expression levels of PTEN were quantified by normalizing to the expression levels of α-actin. c and d. COBs pre-incubated with PBS, IGFBP-2 or PEG-HBD overnight were treated with IGF-I (100 ng/ml) for 15 minutes. Whole cell lysate was collected and expression of pSer473-Akt and Akt was analyzed by Western blot analysis. Expression levels of pSer473-Akt were quantified by normalizing to the expression levels of Akt. Figures shown represent at least 3 independent experiments. Values are expressed as the mean±SEM (n=3-4). Statistical difference was analyzed by Student's t-test. *; <0.001, **; <0.01, ^{†}; <0.05.

[0021] FIG. 6. The heparin-binding domain of IGFBP-2 stimulates cytosolic accumulation and Ser552 phosphorylation of β-catenin by IGF-I. a, MC3T3-E1 cells were serum-starved over-night and treated with IGF-I at the indicated concentration for 6 hours. Expression of β-catenin and α-actin was analyzed by Western blot analysis with membrane and cytosolic fraction. b, Igfbp2^{-/-} calvarial osteoblasts (COBs) were serum-starved over-night with PBS or pegylated heparin-binding domain peptide (PEG-HBD) and then treated with IGF-I (100 ng/ml) for 6 hours. Expression of β-catenin was analyzed by Western blot analysis with cytosolic fraction and quantified by normalizing to α-actin (n=3). c, MC3T3-E1 cells were serum-starved over-night and treated with IGF-I (100 ng/ml) for 15 min. Expression of pSer552-β-catenin, β-catenin, pSer473-Akt, Akt and α-actin was analyzed by Western blot analysis with whole cell lysates. d, Igfbp2^{-/-} COBs were serum-starved over-night with PBS or PEG-HBD and then treated with IGF-I (100 ng/ml) for 15 min. Expression of pSer552-β-catenin was analyzed by Western blot analysis with whole cell lysates and quantified by normalizing to β-catenin (n=3). Figures shown represent at least 3 independent experiments. Values are expressed as the mean±SEM. Statistical difference was analyzed by Student's t-test. *; <0.001, **; <0.01, ^{†}; <0.05.

[0022] FIG. 7. Control peptide for heparin-binding domain peptide does not have any anabolic effects on in vitro osteoblastogenesis. Igfbp2^{-/-} calvarial osteoblasts (COBs) were cultured with osteogenic media with PBS, control peptide (2 μg/ml) or heparin binding domain peptide (HBD-peptide) (2 μg/ml). Osteoblastogenesis was evaluated by Alizarin Red staining.

[0023] FIG. 8. Control peptide for heparin binding domain peptide does not have any anabolic effects on metacarpals ex vivo. Metacarpals were collected from day 1 male Igfbp2^{+/+} mouse, and cultured in DMEM (1 g/L of glucose) containing 1 mM β-glycerophosphate and 50 μg/ml ascorbic acid. Either PBS or control peptide (2 μg/ml) was added to the media. At day 10, bones were treated with 500 ng/ml of calcein for two hours. Calcein incorporated area was visualized (b) and longitudinal length of incorporated area was quantified (c). Metacarpals were fixed with 4% PFA and subjected to Alcian blue and von Kossa double staining (d). Length and width of metacarpals were quantified (e). Values were expressed as the mean±SEM (n=3). Statistical significance was analyzed by Student's t-test. ns; not significant.

[0024] FIG. 9. Control peptide for heparin-binding domain peptide does not suppress PTEN expression in Igfbp2^{+/+} calvarial osteoblasts. Igfbp2^{+/+} calvarial osteoblasts were treated with PBS, control peptide, or heparin-binding domain peptide (HBD-peptide) overnight, and whole cell lysate was collected. PTEN expression was analyzed using western blot analysis (a), and quantitative analysis was performed (b). Values were expressed as the mean±SEM (n=3). Statistical significance was analyzed by ANOVA followed by Bonferroni post-hoc test. ^{a}; p<0.01 vs. PBS, ^{b}; p<0.01 vs. control peptide.

[0025] FIG. 10. The HBD of IGFBP-2 increased cell proliferation of osteoblasts and bone marrow stromal cells as compared to full length (FL) IGFBP-2 (BP2) and control peptide and as seen by increased alkaline phosphatase and alizarin red staining, respectively.

[0026] FIG. 11. The HBD of IGBP-2 rescued the low bone mass phenotype of Igfbp2^{-/-} mice in vivo, as shown by μCT analysis.

[0027] FIG. 12. HBD reversed the increased lymphoid and myeloid hematopoietic phenotype of Igfbp2^{-/-} mice.

[0028] FIG. 13. In competitive re-population bone marrow transplants, Igfbp2^{-/-} bone marrow donor cells repopulated the bone marrow of same-strain recipients with 30% less efficiency than Igfbp2^{+/+} donor cells.

### DETAILED DESCRIPTION OF THE INVENTION

[0029] The present invention is explained in greater detail below. This description is not intended to be a detailed catalog of all the different ways in which the invention may be implemented, or all the features that may be added to the instant invention. For example, features illustrated with respect to one embodiment may be incorporated into other embodiments, and features illustrated with respect to a particular embodiment may be deleted from that embodiment. In addition, numerous variations and additions to the various embodiments suggested herein will be apparent to those skilled in the art in light of the instant disclosure which do not depart from the instant invention. Hence, the following specification is intended to illustrate some particular embodiments of the invention, and not to exhaustively specify all permutations, combinations and variations thereof.

[0030] The disclosures of all United States patents, patent publications and non-patent documents cited herein are incorporated herein by reference in their entirety.

[0031] The present invention is based on the discovery that peptides of IGFBP-2, (e.g., the heparin binding domain (HBD)) can be employed in methods of treating bone disorders, methods of weight control and methods of improving bone marrow reconstitution.

[0032] Thus, in certain embodiments, the present invention provides a method for enhancing bone formation (i.e., increasing the amount of new bone that is laid down) and inhibiting bone resorption (i.e., reducing the amount of bone that is dissolved) simultaneously in a subject in need thereof, comprising administering to the subject an active compound of this invention in an amount effective to enhance bone formation and inhibit bone resorption simultaneously in said subject. Nonlimiting examples of subjects for whom such treatment would be indicated and/or beneficial include women (e.g., postmenopausal; premenopausal) with osteoporosis or low bone mass, men with osteoporosis or low bone mass, subjects with a healing fracture, subjects undergoing prolonged immobilization, subjects who have been or are immobilized for a prolonged period, subjects likely to undergo or experience prolonged immobilization, subjects with estrogen deficiency, etc., as would be known in the art.

[0033] Also provided herein is a method for inducing deposition and maturation of bone in a subject in need thereof (e.g., a subject having a compromised bone condition), comprising administering to the subject an active compound of this invention in an amount effective to induce deposition and maturation of bone in the subject. The methods of this invention may further comprise concurrently administering a bone resorption inhibitor to the subject in an effective amount.

[0034] In some embodiments, a compromised bone condition is at a targeted site of the subject. The site may be an intervertebral space, a facet joint, a site of a bone fracture, bones of the mouth, chin and jaw, or an implant site.

[0035] Also provided herein is a method for improving bone marrow reconstitution in a subject in need thereof, comprising administering to said subject an active compound of this invention in an amount effective to improve bone marrow reconstitution (i.e., restoring (e.g., partially or fully) bone marrow cells in a subject, which can be, for example, a subject having chemotherapy, radiation or other treatments that deplete bone marrow cells. For example, a subject undergoing chemotherapy with or without radiation would benefit from more rapid restoration of cells in the bone marrow in order to prevent opportunistic infections. A subject of these methods can also be a subject having or suspected of having a hematologic disorder (e.g., aplastic anemia; myelodysplasia) that depletes bone marrow cells. Such an improvement or enhancement or increase in bone marrow reconstitution is in comparison to a subject to whom the active compound has not been administered.

[0036] In some embodiments, the methods of this invention can be employed in methods of ex vivo expansion of stem cells, carried out according to protocols known in the art. Thus, the present invention provides a method of expanding stem cells ex vivo, comprising contacting the compound of this invention with stem cells from a subject, wherein said stem cells are maintained under conditions whereby they are reintroduced into the subject.

[0037] For example in some ex vivo embodiments, the stem cells are obtained from a subject, e.g., a human, e.g., from peripheral blood, umbilical cord blood, or bone marrow, and the stem cells are contacted with the compound of this invention outside the body of the subject. Ex vivo embodiments include obtaining stem cells from a subject and culturing the cells for a period of time prior to use (e.g., for transplantation). In some embodiments, after contact with the compound, the cells are delivered to a subject, e.g., the same subject from which the cells were isolated (autologous donation) or a different subject (non-autologous (e.g., syngeneic or allogeneic) donation).

[0038] Nonlimiting examples of a subject for whom these methods would be indicated or beneficial include a subject having or who has had chemotherapy, a subject having or who has had radiation, a subject having aplastic anemia, a subject having myelodysplasia, and any combination thereof.

[0039] Administration of the compound or composition of this invention may be by any suitable route, including intrathecal injection, subcutaneous, cutaneous, oral, intravenous, intraperitoneal, intramuscular injection, in an implant, in a matrix, in a gel, or any combination thereof.

[0040] A bone condition that can be treated according methods of this invention may be one or more of broken bones, bone defects, bone transplant, bone grafts, bone cancer, joint replacements, joint repair, fusion, facet repair, bone degeneration, dental implants and repair, bone marrow deficits and other conditions associated with bone and boney tissue. Bone defects may be a gap, deformation and/or a nonunion fracture in a bone.

[0041] Bone degeneration may be due to osteopenia or osteoporosis (e.g. the patient is afflicted with geriatric or senile osteoporosis, with post-menopausal osteoporosis, etc.), or due to dwarfism.

[0042] Joint replacements that may be treated include vertebral, knee, hip, tarsal, phalangeal, elbow, ankle and/or other articulating joints or replacements thereof. Joint repairs include, but are not limited to, vertebral, knee, hip, tarsal, phalangeal, elbow, ankle, and sacroiliac joint repairs.

[0043] A further aspect of the invention is a method for controlling body weight in a subject in need thereof, comprising administering the subject an active compound as described herein in an amount effective to control body weight. The method may further comprise concurrently administering the subject an additional weight control agent.

[0044] In some embodiments, the subject is obese.

[0045] In some embodiments, the compound is administered in an amount effective to reduce weight gain or induce weight loss (or particularly fat loss) in the subject.

[0046] In some embodiments, the compound is administered in an amount effective to reduce the body mass index of the subject.

[0047] In some embodiments the subject has a body mass index of 25 or 30 kg/m² or above.

[0048] In some embodiments, the administering is continued for a period of at least 16 or 24 weeks, and/or until the individual has achieved at least 5% weight loss or the individual's body mass index is reduced to less than 25 kg/m².

[0049] In some embodiments, the active compound is administered in an amount effective to inhibit fat cell differentiation (e.g., inhibiting fat cell precursor differentiation into mature adipocytes) in the subject.

[0050] Some embodiments further comprise concurrently administering the subject an additional weight control agent.

[0051] The therapeutically effective dosage of any specific active compound of this invention will vary from compound to compound, and patient to patient, and will depend, among other things, upon the effect or result to be achieved, the condition of the patient and the route of delivery. In some embodiments, a dosage from about 0.001 (i.e., 1 ug/kg), 0.05, 0.1, 0.2, 0.3. 0.4, 0.5, 0.6, 0.7, 0.8, 0.9 or 1.0 mg/kg, up to about 30, 40 or 50 mg/kg (e.g., 1, 2, 3, 4, 5, 6, 7, 8, 9, 10, 11, 12, 13, 14, 15, 16, 17, 18, 19, 20, 21, 22, 23, 24, 25, 26, 27, 28, 29, 30, 31, 32, 33, 34, 35, 36, 37, 38, 39, 40, 41, 42, 43, 44, 45, 46, 47, 48, 49, 50 mg/kg), or more, may be used.

### A. Definitions

[0052] “Subjects” as used herein are generally human subjects and includes, but is not limited to, post-menopausal subjects. The subjects may be male or female and may be of any race or ethnicity, including, but not limited to, Caucasian, African-American, African, Asian, Hispanic, Indian, etc. The subjects may be of any age, including newborn, neonate, infant, child, adolescent, adult, and geriatric. In some embodiments the subjects are post-menopausal female subjects, or subjects afflicted with senile osteoporosis. Subjects may also include animal subjects, particularly mammalian subjects such as canines, felines, bovines, caprines, equines, ovines, porcines, rodents (e.g. rats and mice), lagomorphs, primates (including non-human primates), etc., for veterinary medicine or pharmaceutical drug development purposes.

[0053] “Treat,” “treating” or “treatment” as used herein refers to any type of treatment that imparts a benefit to a patient afflicted with a disease, including improvement in the condition of the patient (e.g., in one or more symptoms), delay in the progression of the disease, etc.

[0054] “Pharmaceutically acceptable” as used herein means that the compound or composition is suitable for administration to a subject to achieve the treatments described herein, without unduly deleterious side effects in light of the severity of the disease and necessity of the treatment.

[0055] “Concurrently administering” or “concurrently administer” as used herein means that the two or more compounds or compositions are administered closely enough in time to produce a combined effect (that is, concurrently may be simultaneously, or it may be two or more events occurring within a short time period before or after each other, e.g., sequentially). Simultaneous concurrent administration may be carried out by mixing the compounds prior to administration, or by administering the compounds at the same point in time but at different anatomic sites and/or by using different routes of administration.

[0056] “Bone resorption inhibitor” as used herein may be any suitable bone resorption inhibitor, including but not limited to a bisphosphonate, a selective estrogen receptor modulator, calcitonin, a vitamin D analog, and a calcium salt. See, e.g., U.S. Pat. No. 7,507,715. Numerous such compounds are known. See, e.g., U.S. Pat. Nos. 7,018,982; 6,723,696; 6,284,730; and 5,039,669.

[0057] “Weight control agent” as used herein includes any additional weight control active agent, including but not limited to appetite suppressants such as sibutramine, phentermine, diethylpropion, phendimetrazine, etc.; lipase inhibitors such as orilstat; antidepressants such as bupropion; anti-seizure agents such as topiramate, zonisamide, and metformin, etc.

[0058] “Capping group” as used herein includes, but is not limited to, acetyl, benzoyl, formyl, trifluoroacetyl, benzyloxycarbonyl, tert-butyloxycarbonyl, biphenylylisopropyloxycarbonyl, triphenylmethyl, o-nitrobenzenesulfenyl, and diphenylphosphinyl. The capping groups may consist of such groups as R¹⁰CO—, R¹⁰—O—CO—, R¹⁰—PO—, R¹⁰—SO₂— and arylalkyl-; where R¹⁰ is selected from the group consisting of H, alkyl, alkenyl, alkynyl, aryl, and arylalkyl.

[0059] “Linking group” or “linker” as used herein includes non-amino acid linking groups such as are known in the art (see, e.g., U.S. Pat. Nos. 7,468,418; 7402,652; and 7,351,797) or variations thereof that will be apparent to those skilled in the art.

[0060] “Alkyl,” as used herein, refers to a straight or branched chain hydrocarbon containing from 1 to 10 carbon atoms. Representative examples of alkyl include, but are not limited to, methyl, ethyl, n-propyl, iso-propyl, n-butyl, sec-butyl, iso-butyl, tert-butyl, n-pentyl, isopentyl, neopentyl, n-hexyl, 3-methylhexyl, 2,2-dimethylpentyl, 2,3-dimethylpentyl, n-heptyl, n-octyl, n-nonyl, n-decyl, and the like. “Lower alkyl” as used herein, is a subset of alkyl and refers to a straight or branched chain hydrocarbon group containing from 1 to 4 carbon atoms. Representative examples of lower alkyl include, but are not limited to, methyl, ethyl, n-propyl, iso-propyl, n-butyl, iso-butyl, tert-butyl, and the like.

[0061] “Alkenyl,” as used herein, refers to a straight or branched chain hydrocarbon containing from 2 to 10 carbons and containing at least one carbon-carbon double bond formed by the removal of two hydrogens. Representative examples of “alkenyl” include, but are not limited to, ethenyl, 2-propenyl, 2-methyl-2-propenyl, 3-butenyl, 4-pentenyl, 5-hexenyl, 2-heptenyl, 2-methyl-1-heptenyl, 3-decenyl and the like. “Lower alkenyl” as used herein, is a subset of alkenyl and refers to a straight or branched chain hydrocarbon group containing from 1 to 4 carbon atoms.

[0062] “Alkynyl,” as used herein, refers to a straight or branched chain hydrocarbon group containing from 2 to 10 carbon atoms and containing at least one carbon-carbon triple bond. Representative examples of alkynyl include, but are not limited, to acetylenyl, 1-propynyl, 2-propynyl, 3-butynyl, 2-pentynyl, 1-butynyl and the like. “Lower alkynyl” as used herein, is a subset of alkyl and refers to a straight or branched chain hydrocarbon group containing from 1 to 4 carbon atoms.

[0063] The alkyl, alkenyl, and alkynyl groups of the invention can be substituted or unsubstituted and are either unless otherwise specified. When substituted the alkyl, alkenyl or alkynyl groups of the invention can be substituted with 1, 2, 3, 4, or 5 or more substituents independently selected from alkenyl, alkenyloxy, alkoxy, alkoxyalkoxy, alkoxycarbonyl, alkyl, alkylcarbonyl, alkylcarbonyloxy, alkylsulfinyl, alkylsulfonyl, alkylthio, alkynyl, aryl, azido, arylalkoxy, arylalkyl, aryloxy, carboxy, cyano, formyl, halogen, haloalkyl, haloalkoxy, hydroxy, hydroxyalkyl, mercapto, nitro, sulfamyl, sulfo, sulfonate,

[0064] “Aryl” as used herein, refers to a monocyclic carbocyclic ring system or a bicyclic carbocyclic fused ring system having one or more aromatic rings. Representative examples of aryl include, azulenyl, indanyl, indenyl, naphthyl, phenyl, tetrahydronaphthyl, and the like.

[0065] The aryl groups of this invention can be substituted with 1, 2, 3, 4, or 5 or more substituents independently selected from alkenyl, alkenyloxy, alkoxy, alkoxyalkoxy, alkoxycarbonyl, alkyl, alkylcarbonyl, alkylcarbonyloxy, alkylsulfinyl, alkylsulfonyl, alkylthio, alkynyl, aryl, azido, arylalkoxy, arylalkyl, aryloxy, carboxy, cyano, formyl, halogen, haloalkyl, haloalkoxy, hydroxy, hydroxyalkyl, mercapto, nitro, sulfamyl, sulfo, sulfonate,

[0066] “Arylalkyl,” as used herein, refers to an aryl group, as defined herein, appended to the parent molecular moiety through an alkenyl group, as defined herein. Representative examples of arylalkenyl include, but are not limited to, 2-phenylethenyl, 3-phenylpropen-2-yl, 2-naphth-2-ylethenyl, and the like, which may be substituted or unsubstituted as noted above.

[0067] “Polyalkylene oxides” as used herein are known (see, e.g., U.S. Pat. No. 7,462,687) and include poly(ethylene glycol) or “PEG”. Additional examples may contain hetero atoms such as S or N, and are typically linear polyalkylene oxides such as: O—(CH₂CH₂O)ₓ—, —O—C(O)CH₂—O—(CH₂CH₂O)ₓ—CH₂C(O)—O—, —NRCH₂CH₂2-O—(CH₂CH₂O)ₓ—CH₂CH₂NR—, and —SHCH₂CH₂—O—(CH₂CH₂O)ₓ—CH₂CH₂SH—, wherein R is H or loweralkyl (preferably methyl), and x is an integer that provides or yields a total number average molecular weight for the molecule of from about 1,000, 2,000, 3,000, 4,000, 5,000, 6,000, 7,000, 8,000, 9,000, 10,000, 15,000, 20,000, 30,000, 40,000, 50,000, 60,000, 70,000, 80,000, 90,000 or 100,000 daltons or more.

[0068] “Analog” as used herein is a peptide that has the physiological activity of the parent compound thereof, and that includes one or more (e.g., two, three, four, five or six or more) amino acids different from the amino acid sequence of a naturally occurring parent peptide. Such an analog preferably has at least about 70% of the physiological activity of the parent peptide. Such different amino acids may be additions, substitutions, deletions, or combinations thereof, including addition of non-natural side-chain groups and backbone links. Modifications of peptides to produce analogs thereof are known. See, e.g., U.S. Pat. No. 7,323,543; see also U.S. Pat. Nos. 7,482,171; 7,459,152; and 7,393,919.

### B. Active Compounds

[0069] The single letter code for amino acids as used herein is: A (Ala), C (Cys), D (Asp), E (Glu), F (Phe), G (Gly), H(His), I (Ile), K (Lys), L (Leu), M (Met), N (Asn), P (Pro), Q (Gln), R (Arg), S (Ser), T (Thr), V (Val), W (Trp), and Y (Tyr)).

[0070] Active compounds of the present invention are, in general, compounds (from amino or N terminus to carboxy or C terminus) of Formula I:

X—Y—R¹R²R³R⁴R⁵R⁶R⁷R⁸R⁹R¹⁰R¹¹R¹²R¹³—Y′—X′ (I)

wherein:

[0071] X is present or absent and when present is a capping group, a polyalkylene oxide (e.g., a poly(ethylene glycol), “PEG”), or a peptide consisting of from 2 to 6 or 10 additional amino acids (of any type), which peptide is optionally terminated by a capping group or polyalkylene oxide;

[0072] Y is present or absent and when present is a linking group;

[0073] R¹ is present or absent and when present is a positively charged (at pH 6.0) amino acid, which can be an amino acid selected from the group consisting of K, R and H;

[0074] R² is present or absent and when present is a positively charged (at pH 6.0) amino acid, which can be an amino acid selected from the group consisting of K, R and H;

[0075] R³ is any amino acid and in some embodiments is a positively charged (at pH 6.0) amino acid, which can be an amino acid selected from the group consisting of K, R and H;

[0076] R⁴ is any amino acid and in some embodiments is an amino acid with a nonpolar side chain, which can be an amino acid selected from the group consisting of L, I or V;

[0077] R⁵ is any amino acid and in some embodiments is G;

[0078] R⁶ is any amino acid and in some embodiments is an amino acid with a nonpolar side chain, which can be an amino acid selected from the group consisting of L, I and V;

[0079] R⁷ is any amino acid and in some embodiments is an amino acid selected from the group consisting of E and N;

[0080] R⁸ is any amino acid and in some embodiments is an amino acid selected from the group consisting of E and N;

[0081] R⁹ is any amino acid and in some embodiments is P;

[0082] R¹⁰ is a positively charged (at pH 6.0) amino acid, which can be an amino acid selected from the group consisting of K, R and H;

[0083] R¹¹ is a positively charged (at pH 6.0) amino acid, which can be an amino acid selected from the group consisting of K, R and H;

[0084] R¹² is present or absent and when present is any amino acid and in some embodiments is an amino acid with a nonpolar side chain, which can be an amino acid selected from the group consisting of L, I or V;

[0085] R¹³ is present or absent and when present is a positively charged (at pH 6.0) amino acid, which can be an amino acid selected from the group consisting of K, R and H;

[0086] Y′ is present or absent and when present is a linking group; and

[0087] X′ is present or absent and when present is a capping group, a polyalkylene oxide (e.g., PEG), or a peptide consisting of from 2 to 6 or 10 additional amino acids, which peptide is optionally terminated by a capping group or polyalkylene oxide.

[0088] Also provided herein is a pharmaceutically acceptable salt of the compound of Formula I.

[0089] Amino acids in peptides of the present invention may be in the D or L configuration: e.g., all D; all L; some D and some L in any combination.

[0090] In some embodiments, X is preferably a polyalkylene oxide, or a peptide consisting of from 2 to 6 or 10 additional amino acids, which peptide is terminated by polyalkylene oxide.

[0091] Nonlimiting examples of an active agent of this invention include KHHLGLEEPKKLR (SEQ ID NO:1), KHHLGLEEPKK (SEQ ID NO:2), HLGLEEPKKLR (SEQ ID NO:3), analogs thereof, prodrug of any thereof, or pharmaceutically acceptable salts of any thereof.

[0092] Illustrative examples of the foregoing include, but are not limited to the peptides listed in Table 7 herein.

[0093] Additional examples of compounds of the present invention include all of the foregoing compounds, where the first one or two N-terminal amino acids are deleted.

[0094] Additional examples of compounds of the present invention include all of the foregoing compounds, with one, two or three additional C-terminal amino acids of any type coupled thereto.

[0095] Additional examples of compounds of the present invention include all of the foregoing compounds, with a 10,000 to 30,000 molecular weight of poly(ethylene glycol) (or “PEG”) moiety coupled to either the N or C terminus thereof.

[0096] “Polyalkylene glycol” means straight or branched polyalkylene glycol polymers including, but not limited to, polyethylene glycol (PEG), polypropylene glycol (PPG), and polybutylene glycol (PBG), as well as co-polymers of PEG, PPG and PBG in any combination, and includes the monoalkylether of the polyalkylene glycol. Thus, in various embodiments of this invention, the polyalkylene glycol in the compositions of this invention can be, but is not limited to, polyethylene glycol, polypropylene glycol, polybutylene glycol, and any combination thereof.

[0097] In certain embodiments, the polyalkylene glycol of the composition is polyethylene glycol or “PEG.” The term “PEG subunit” refers to a single polyethylene glycol unit, i.e., —(CH₂CH₂O)—.

[0098] In some embodiments, the polyalkylene glycol (e.g., PEG) can be non-polydispersed, monodispersed, substantially monodispersed, purely monodispersed, or substantially purely monodispersed.

[0099] “Monodispersed” is used to describe a mixture of compounds wherein about 100 percent of the compounds in the mixture have the same molecular weight.

[0100] “Substantially monodispersed” is used to describe a mixture of compounds wherein at least about 95 percent of the compounds in the mixture have the same molecular weight.

[0101] “Purely monodispersed” is used to describe a mixture of compounds wherein about 100 percent of the compounds in the mixture have the same molecular weight and have the same molecular structure. Thus, a purely monodispersed mixture is a monodispersed mixture, but a monodispersed mixture is not necessarily a purely monodispersed mixture.

[0102] “Substantially purely monodispersed” is used to describe a mixture of compounds wherein at least about 95 percent of the compounds in the mixture have the same molecular weight and have the same molecular structure. Thus, a substantially purely monodispersed mixture is a substantially monodispersed mixture, but a substantially monodispersed mixture is not necessarily a substantially purely monodispersed mixture.

### C. Pharmaceutical Formulations

[0103] The active compounds described above may be formulated for administration in a pharmaceutical carrier in accordance with known techniques. See, e.g., Remington, The Science And Practice of Pharmacy (9^{th} Ed. 1995). In the manufacture of a pharmaceutical formulation according to the invention, the active compound (including the physiologically acceptable salts thereof) is typically admixed with, inter alia, an acceptable carrier. The carrier must, of course, be acceptable in the sense of being compatible with any other ingredients in the formulation and must not be deleterious to the patient. The carrier may be a solid or a liquid, or both, and is preferably formulated with the compound as a unit-dose formulation, for example, a tablet, which may contain from 0.01 or 0.5% to 95% or 99% by weight of the active compound. One or more active compounds may be incorporated in the formulations of the invention, which may be prepared by any of the well known techniques of pharmacy comprising admixing the components, optionally including one or more accessory ingredients.

[0104] The formulations of the invention include those suitable for oral, rectal, topical, buccal (e.g., sub-lingual), vaginal, parenteral (e.g., subcutaneous, intramuscular, intradermal, or intravenous), topical (i.e., both skin and mucosal surfaces, including airway surfaces) and transdermal administration, although the most suitable route in any given case will depend on the nature and severity of the condition being treated and on the nature of the particular active compound which is being used.

[0105] Formulations suitable for oral administration may be presented in discrete units, such as capsules, cachets, lozenges, or tablets, each containing a predetermined amount of the active compound; as a powder or granules; as a solution or a suspension in an aqueous or non-aqueous liquid; or as an oil-in-water or water-in-oil emulsion. Such formulations may be prepared by any suitable method of pharmacy which includes the step of bringing into association the active compound and a suitable carrier (which may contain one or more accessory ingredients as noted above). In general, the formulations of the invention are prepared by uniformly and intimately admixing the active compound with a liquid or finely divided solid carrier, or both, and then, if necessary, shaping the resulting mixture. For example, a tablet may be prepared by compressing or molding a powder or granules containing the active compound, optionally with one or more accessory ingredients. Compressed tablets may be prepared by compressing, in a suitable machine, the compound in a free-flowing form, such as a powder or granules optionally mixed with a binder, lubricant, inert diluent, and/or surface active/dispersing agent(s). Molded tablets may be made by molding, in a suitable machine, the powdered compound moistened with an inert liquid binder.

[0106] Formulations suitable for buccal (sub-lingual) administration include lozenges comprising the active compound in a flavoured base, usually sucrose and acacia or tragacanth; and pastilles comprising the compound in an inert base such as gelatin and glycerin or sucrose and acacia.

[0107] Formulations of the present invention suitable for parenteral administration comprise sterile aqueous and non-aqueous injection solutions of the active compound(s), which preparations are preferably isotonic with the blood of the intended recipient. These preparations may contain anti-oxidants, buffers, bacteriostats and solutes which render the formulation isotonic with the blood of the intended recipient. Aqueous and non-aqueous sterile suspensions may include suspending agents and thickening agents. The formulations may be presented in unit\dose or multi-dose containers, for example sealed ampoules and vials, and may be stored in a freeze-dried (lyophilized) condition requiring only the addition of the sterile liquid carrier, for example, saline or water-for-injection immediately prior to use. Extemporaneous injection solutions and suspensions may be prepared from sterile powders, granules and tablets of the kind previously described. For example, in one aspect of the present invention, there is provided an injectable, stable, sterile composition comprising an active compound(s), or a salt thereof, in a unit dosage form in a sealed container. The compound or salt is provided in the form of a lyophilizate which is capable of being reconstituted with a suitable pharmaceutically acceptable carrier to form a liquid composition suitable for injection thereof into a subject. The unit dosage form typically comprises from about 10 mg to about 10 grams of the compound or salt. When the compound or salt is substantially water-insoluble, a sufficient amount of emulsifying agent which is physiologically acceptable may be employed in sufficient quantity to emulsify the compound or salt in an aqueous carrier. One such useful emulsifying agent is phosphatidyl choline.

[0108] Formulations suitable for rectal administration are preferably presented as unit dose suppositories. These may be prepared by admixing the active compound with one or more conventional solid carriers, for example, cocoa butter, and then shaping the resulting mixture.

[0109] Formulations suitable for topical application to the skin preferably take the form of an ointment, cream, lotion, paste, gel, spray, aerosol, or oil. Carriers which may be used include petroleum jelly, lanoline, polyethylene glycols, alcohols, transdermal enhancers, and combinations of two or more thereof.

[0110] Formulations suitable for transdermal administration may be presented as discrete patches adapted to remain in intimate contact with the epidermis of the recipient for a prolonged period of time. Formulations suitable for transdermal administration may also be delivered by iontophoresis (see, for example, Pharmaceutical Research 3 (6):318 (1986)) and typically take the form of an optionally buffered aqueous solution of the active compound. Suitable formulations comprise citrate or bis\tris buffer (pH 6) or ethanol/water and contain from 0.1 to 0.2M active ingredient.

[0111] Further, the present invention provides liposomal formulations of the compounds disclosed herein and salts thereof. The technology for forming liposomal suspensions is well known in the art. When the compound or salt thereof is an aqueous-soluble salt, using conventional liposome technology, the same may be incorporated into lipid vesicles. In such an instance, due to the water solubility of the compound or salt, the compound or salt will be substantially entrained within the hydrophilic center or core of the liposomes. The lipid layer employed may be of any conventional composition and may either contain cholesterol or may be cholesterol-free. When the compound or salt of interest is water-insoluble, again employing conventional liposome formation technology, the salt may be substantially entrained within the hydrophobic lipid bilayer which forms the structure of the liposome. In either instance, the liposomes which are produced may be reduced in size, as through the use of standard sonication and homogenization techniques.

[0112] Of course, the liposomal formulations containing the compounds disclosed herein or salts thereof, may be lyophilized to produce a lyophilizate which may be reconstituted with a pharmaceutically acceptable carrier, such as water, to regenerate a liposomal suspension.

[0113] Other pharmaceutical compositions may be prepared from the water-insoluble compounds disclosed herein, or salts thereof, such as aqueous base emulsions. In such an instance, the composition will contain a sufficient amount of pharmaceutically acceptable emulsifying agent to emulsify the desired amount of the compound or salt thereof. Particularly useful emulsifying agents include phosphatidyl cholines, and lecithin.

[0114] In addition to active compound(s), the pharmaceutical compositions may contain other additives, such as pH-adjusting additives. In particular, useful pH-adjusting agents include acids, such as hydrochloric acid, bases or buffers, such as sodium lactate, sodium acetate, sodium phosphate, sodium citrate, sodium borate, or sodium gluconate. Further, the compositions may contain microbial preservatives. Useful microbial preservatives include methylparaben, propylparaben, and benzyl alcohol. The microbial preservative is typically employed when the formulation is placed in a vial designed for multidose use. Of course, as indicated, the pharmaceutical compositions of the present invention may be lyophilized using techniques well known in the art.

[0115] The present invention is illustrated in the following non-limiting examples.

### EXAMPLES

[0116] Initial studies showed that when some cell types were exposed to IGFBP-2, it could enhance the ability of IGF-I to stimulate DNA synthesis and growth. In contrast other labs showed that high concentrations of the native protein often inhibited the ability of IGF-I to stimulate growth.

[0117] The studies described herein have focused on IGF independent actions of IGFBP-2 that are independent of its ability to inhibit IGF-I binding to its receptor and inhibit growth. Specifically it has been shown in mice in which the IGFBP-2 gene had been deleted that they had reduced bone turnover as reflected by histologic examination of the bones following tetracycline labeling and that cortical thickness and trabecular thickness were also reduced as evidenced by DEXA scanning, PIXI scanning and microCT analysis. A molecular explanation for this phenomenon was provided by the observation that both aortic smooth muscle and bone cells removed from these animals showed high concentrations of the growth inhibitor PTEN and that exogenous addition of IGFBP-2 or the 13 amino acid peptide described herein could suppress PTEN concentrations, thus leading to enhanced activation of the PI-3 kinase/AKT pathway which is necessary for growth stimulation. Other workers have also suggested that IGFBP-2 may stimulate stem cells. Lodish and Zhang demonstrated that IGFBP-2 was a potent stem cell growth factor and could stimulate hematopoetic stem cell reconstitution after bone marrow ablation with radiation therapy. These investigators did not investigate whether any fragments of IGFBP-2 or any portions of the protein had this property.

### Example 1

### Peptide Sequences

[0118] The amino acid sequence of a 13 amino acid peptide of the invention is as follows:

| | |
|---|---|
| KHHLGLEEPKKLR. | (SEQ ID NO: 1) |

[0119] The amino acid sequence of an 11 amino acid peptide of the present invention (a fragment of SEQ ID NO: 1 that retains biological activity) is as follows:

| | |
|---|---|
| KHHLGLEEPKK. | (SEQ ID NO: 2) |

[0120] The amino acid sequence of an 11 amino acid peptide of the present invention (a fragment of SEQ ID NO: 1 that retains biological activity) is as follows:

| | |
|---|---|
| HLGLEEPKKLR | (SEQ ID NO: 3) |

[0121] Variations on the foregoing sequences that are biologically active include substitutions that can be made for the K or H in positions 1, 2, and 3 (positions referring to SEQ ID NO: 1) with arginine or lysine, and which retain activity. Similarly, substitutions can be made for L at position 4 and 6 with I or V. Substitutions can be made at positions 7 or 8, for either E, with N. Substitutions can be made at positions 10 and 11 with either H or R. Substitutions can be made at position 12 with L for 1 or V, and at position 13 for R with K or H.

[0122] The rationale for picking this particular region of the IGFBP-2 protein was primarily based on certain factors. The first is its charge density; that is, the peptide contains 6 basic residues in 13 positions and 2 acidic residues. This gives it an extremely high charge density. Secondly, it is flanked by a polyproline sequence, which indicates it is held in rigid position by the parent protein. Third, this sequence is unique for IGFBP-2. The IGFBP family contains 6 members that have a high degree of sequence conservation at the N terminus and C terminus of the proteins. However, the mid region of each protein shows sequence divergence. This 13 amino acid sequence is completely unique for IGFBP-2 and is not contained in any of the other 6 IGF binding proteins. The importance of this is that knockout of IGFBP-2 in mice gives a unique phenotype: low bone turnover and high fat mass. Knockout of any of the other 5 IGF binding proteins does not give this phenotype. Therefore, it was hypothesized that there was a region within IGBP-2 that accounted for these effects.

### Example 2

### Preparation of Pegylated Peptide

[0123] The 13 amino acid peptide of SEQ ID NO: 1 described herein was prepared by solid phase synthesis, purified by HPLC, and then assessed for purity using mass spectrometry. Poly(ethylene glycol) (“PEG”) was purchased from JenKem Technology USA (2033 W. McDermott Dr., Suite 320 #188, Allen, Tex. 75013-4675). 10.3 mg of the peptide was dissolved in 1.0 ml of 50 mM sodium phosphate pH 6.5. 406 mg of methoxyPEG propinaldehyde molecular weight 20 kDa was dissolved in 4 ml of 50 mM sodium phosphate. 120 ul of a 1M solution of sodium cyanoborhydride, tetrahydrofuran (Aldridge) was added to the solution of PEG. 1 ml of peptide was then added to the PEG solution, followed by additional 1 ml of sodium phosphate. The reaction mixture was then rotated in a 15 ml conical tube for 24 hours at 4° C. Following incubation, Tris base was added to a final concentration of 6.8 mM to block unreacted sites. N-terminal peglyation was verified by SDS-PAGE followed by Coumassie staining, which yielded a molecular weight that was consistent with 1 PEG molecule added per molecule of peptide. The compound was also analyzed by immunoblotting using an antibody that had been specifically prepared against the 13 amino acid sequence. The electrophoretic mobility of the Coumassie stained protein and the immunoblotted protein were identical, indicating that the immunoreactive peptide had been pegylated.

### Example 3

### Fat Cell Assays

[0124] In some assays, fat cell data were obtained by using the cell line 3T3L1, which is used to study fat cell differentiation. These cells are grown as fat cell precursors. These cells are maintained in Hams F12 with fetal calf serum and 15 mM glutamine. To stimulate them to enter the fat cell differentiation pathway, isomethylbutylxanine, dexamethasone and insulin are added using concentrations of 0.5 mM IBMX 16.7 nM insulin and 0.1 uM dexamethasone. In some cases 100 ng/ml IGF-I was added instead of insulin. Three days after the addition, differentiation into adipocytes is apparent and is detected by oil red O staining.

[0125] To determine the effects of the peptide of SEQ ID NO:1, it was added at concentrations of 20 ng/ml, 200 ng/ml and 2 ug/ml. A detectable inhibition of adipocyte differentiation, as determined by a decrease in the number of oil red O positive cells, was detected using 20 ng/ml of peptide. The response was maximal at 200 ng/ml and not increased further by adding 2 mcg/ml. Wildtype IGFBP-2 was tested in parallel and was found to also inhibit adipocyte differentiation using concentrations between 50-500 ng/ml.

[0126] For oil red O staining, a stock solution of 0.5 ml/100 ml isoproponol is prepared. 60 ml of solution is mixed with 40 ml of water and allowed to sit at room temperature for an hour and then filtered. The media is aspirated from the adipocyte cultures and cells are fixed in 1% formaldehyde. Formaldehyde is aspirated and the oil red O solution is added in an amount necessary to cover the cells, which are then left at room temperature for one hour. The stain is then removed and the plates are washed with distilled water and dried. Typically 60-70% of the cells stain positive after 3 days.

[0127] The maximum effect of the peptide was to inhibit differentiation to a level wherein <20% of the cells were positive. These findings were reconfirmed using primary mouse preadipocytes. 35-50 day old mice were killed and inguinal fat pads were removed aseptically. Fat tissue was washed and dissolved in Hanks basic salt solution containing 0.1% glucose and 2 mg/ml collagenase, (type 3 Worthington) and 4% BSA. Following 15 min digestion at 37°, the tissue was separated by dispersion and pipetting and then filtered through an 80 micron sterile nylon filter. The cells were then plated in DMEM F12 containing 10% fetal calf serum and then centrifuged at 700×g to separate the stromal vascular cells from the adipocytes, which float. The supernatant was discarded and the cell pellet which contained the stromal vascular cells was resuspended in DMEM F12 with 10% FCS and plated at a density of 15,000 cells/cm². The medium was aspirated 24 hr later and fresh medium was replaced every 3 days until the cells reached 80-90% confluence. Differentiation was induced by adding serum free medium containing 25 mM glucose, 10 ug/ml transferin, 10 nM T3, 10-7 dexamethasone, 5 ug/ml HDL and 16.7 nM insulin. This was added to cultures that were between 30-50% confluent. Medium was replaced every 3 days until fat droplets were observed, usually 6-8 days. They were then confirmed by oil Red O staining as described previously. The peptide was tested at concentrations between 2 ng and 2 ug/ml and native IGFBP-2 protein between 50-500 ng/ml. The IGFBP-2 had been purified from cellular conditioned medium and was determined to be homogenous by amino acid sequence analysis.

### Example 4

### Measurement of Osteoclast Differentiation

[0128] The method for osteoclast differentiation is as follows: Balb/c mice in which the IGFBP-2 gene had been deleted (see V. DeMambro et al, Endocrinology, 149(5): 2051-2061 (2007)) were anesthetized and sacrificed using cervical dislocation. The femurs from each mouse were dissected free of soft tissue and the bone marrow aspirated by needle puncture. Cells were removed sterile and resuspended in DMEM with 10% fetal calf serum. The cells were centrifuged at 700×g and the cell pellet resuspended in medium and plated in 24 well plates at a concentration of 5000 cells/cm². The plates that are used are low adherence plates that have no additives to facilitate cell adherence. Under these conditions macrophages will adhere while other cells will not. The media is supplemented with mCSF 20 ng/ml. After 3 days the cells are removed from the plate and the adherent macrophages are exposed to fresh media containing 10% FBS and mCSF. This is repeated again after 3 days and then after an additional 3 days cells are trypsinized and replated in fresh plates at 6×10⁴ cells/cm. At this time RANK ligand, 50 ng/ml, is added, although in some experiments concentrations as low as 10 ng/ml were utilized. Medium is changed at 3 and 6 days and on day 7 cells are stained for tartrate resistant acid phosphatase, a marker of osteoclast differentiation. IGFBP-2 was added at concentrations between 50 ng/ml and 500 mcg/ml. The peptide was added at 20 or 200 ng/ml.

[0129] The results showed that the cells would not differentiate into osteoclasts without addition of the peptide or native IGFBP-2. Additionally, in the presence of the peptide, the serum concentration could be lowered to as low as 0.5% and osteoclast differentiation was still detected. Additionally, if 2% serum was utilized, mCSF could be deleted from the medium and RANK ligand lowered to as low at 30 ng/ml. However it was not possible to remove IGFBP-2. That is, cultures maintained without IGFBP-2 or the peptide did not differentiate into osteoclasts.

[0130] For tartrate resistant acid phosphatase staining, a 1% solution is prepared and incubated with the cells for 30 min at room temperature. Cultures are then washed and cell number determined by manual counting. In some experiments the pegylated 13 amino acid peptide was compared to the nonpegylated peptide and found to have equal biologic activity.

### Example 5

### Measurement of Osteoblast Differentiation

[0131] For measurement of osteoblast differentiation, the cells are also derived from the same bone marrow aspirates. However in some experiments they were derived from calvaria obtained from newborn animals. Cells are plated in 6 well plates at 20×10⁶ cells/well in alpha MEM with 10% fetal bovine serum. Media was changed on day 1 and 3. At day 3 the cells received differentiation medium, which is alphaMEM containing 10% fetal calf serum, 8 mM glycerol phosphate and 50 ug/ml ascorbic acid. Media subsequently is changed every 2 days until termination of the experiment, generally at 18 days. In some experiments fetal calf serum concentration was lowered to either 5% or 2%. IGFBP-2 200 ng/ml was added to some cultures or the IGFBP-2 peptide at concentrations between 2 ng/ml and 2 mcg/ml. To determine osteoblast differentiation, the cells were fixed with 4% paraformaldehyde and then stained for alkaline phosphatase. The cells were then counterstained with von kossa stain to detect mineralization. In some experiments the pegylated 13 amino acid peptide was compared to the nonpegylated peptide and found to have equal biologic activity.

### Example 6

### Bone Growth and Mineralization Studies

[0132] This system uses an ex vivo explant system, therefore it is a transition between cultured cells and in vivo experiments. The bone forming tissue is removed directly from a mouse and then grown in organ culture for several days. The test additives can be added directly to the medium at any concentration in order to test for biological activity. The method is as follows: mouse metatarsal bones were isolated from newborn mice between days 0 and 3 after birth using the dissecting microscope. The middle three metatarsals were used for all experiments. Three metatarsals were incubated per well in a 24 well tissue culture dish in DMEM containing 0.5% bovine serum, 0.5M ascorbic acid, 1 mM beta glycerol phosphate at 37° C. The medium was replaced one day later and the metatarsals are cultured for up to 10 days. Growth was measured by quantitative increase in size, both length and width of the bones using an inverted phase microscope with a built in micrometer scaling bar for measurements. Mineralization was assessed by the addition of calcein (500 ng/ml) to the medium for 2 hrs prior to tissue fixation. Fluorescent images were captured using a digital camera attached to an inverted microscope and quantifying calcein fluorescence under the appropriate weight length stimulus. Bone and cartilage histology were measured by fixing the bones in 4% PFA overnight and storing at 70% ethanol, followed by parafilm embedding sectioning and staining. Sections were stained with H&E, Alizaran red or alkaline phosphatase. For analysis of proteins, the tissue was homogenized in Laemmli sample buffer and gels were run using standard SDS polyacrylamide gel electrophoresis and western blotting.

[0133] Results demonstrated that addition of either intact IGFBP-2 or the IGFBP-2 peptide at a concentration of 20-200 ng/ml stimulated bone growth and calcification in metatarsals derived from the IGFBP-2−/− mice. The peptide also had a modest additional stimulatory effect on metatarsals from normal, but the percent increase was much greater in the metatarsals derived from the IGFBP-2 null animals.

### Example 7

### In Vivo Rescue of the Bone Phenotype in IGFBP-2−/− Mice

[0134] IGFBP-2−/− mice have reduced bone mineral density, reduced cortical and trabecular thickness and reduced bone turnover, both formation and resorption. To determine if the 13 amino acid peptide was active systemically, a pegylated preparation was prepared in order to extend halflife. This preparation was then injected into the mice. Mice between the ages of 16 and 20 weeks were utilized. These mice are known to have a major bone phenotype. The peptide was injected at a dose of 50 mcg of peptide plus conjugate, that is the total molecular weight of PEG plus the peptide, which is approximately 23,000 molecular weight was injected intraperitoneally five days per week for three weeks. Six mice were injected in each group. The major measure of bone density is the bone volume over total volume as calculated by micro CT analysis. This measures the amount of total bone within a given space. Control animals receive PBS injections.

[0135] The BV/TV values were as follows: For the normal mice, the value of the volume occupied by bone was 0.22 (22%); for the mice, with the IGFBP-2 gene deletion, the value was 0.12; and for mice that received the peptide, it was 0.18. Therefore, injection of the peptide rescued the bone phenotype to within 70% of normal even though these mice had gone the first 6 weeks of life without exposure to this protein. Measurement of the cortical thickness also showed that it was substantially increased by administration of the peptide. Analysis of the bones biochemically showed that PTEN was downregulated. Therefore it appears that the peptide is fully capable of rescuing a bone phenotype in a whole animal model.

### Example 8

### The Heparin Binding Domain of IGFBP2 is Anabolic to the Skeleton and Works Through a Mechanism that is Independent of IGF-I Binding

[0136] Mice. Generation of the original mixed background strain, B6; 129-Igfbp2<tm1Jep>, which are refer to Igfbp2^{-/-} mice, has been described previously^{10,52}. The original mice were backcrossed onto C57BL/6J background for at least 10 generations. All in vivo and ex vivo experimental studies were performed using male mice. All the animal studies were reviewed and approved by the Institutional Animal Care and Use Committee of Maine Medical Center Research Institute. Mice had free access to water and diet for the duration of the study. Colony environmental conditions included 14:10 hour light:dark cycles.

[0137] Cell culture. Neonatal calvarial osteoblasts were collected from 7-10 day old mice as previously described⁵³. Briefly, calvariae were digested 5 times with collagenase P and Trypsin. Cells released from digests 2 through 5 were collected as primary calvarial osteoblasts, and maintained in DMEM supplemented with 10% FCS and non-essential amino acids. Osteoblastogenesis of primary calvarial osteoblasts was carried out by treating cells with 4 mM β-glycerophosphate and 50 μg/ml ascorbic acid in αMEM. Bone marrow stromal cells (BMSCs) were harvested from femurs and tibias of 8 weeks old mice as described previously¹⁰. Osteoblastogenesis of BMSCs was induced by the treatment with osteogenic media consisting of αMEM containing 10% FCS, 8 mM β-glycerophosphate, and 50 μg/ml ascorbic acid.

[0138] Metacarpal culture. Metacarpals were isolated from Igfbp2^{-/-} mice at 1-day old and incubated in DMEM containing 0.5% BSA, 50 μg/ml ascorbic acid and 1 mM β-glycerol phosphate for 10 days⁵⁴. Stimulants were added to culture media from day 1. At day 10, metacarpals were incubated in media containing calcein (500 ng/ml) for 2 hours for staining of calcium deposition, and images were obtained. Then, bones were fixed with 4% PFA, embedded in paraffin, and processed for Alcian blue and von Kossa double staining.

[0139] Real-time PCR. Total RNA was prepared using RNeasy Mini Kit (Qiagen) and treated with DNase (Qiagen). cDNA was generated using a random hexamer and reverse transcriptase (Superscript III, Invitrogen) according to the manufacturer's instructions. Quantification of mRNA expression was carried out using an iQ SYBR Green Supermix in a iQ5 thermal cycler and detection system (Bio-Rad). 18S rRNA or Gapdh was used as an internal standard control gene for all quantification.

[0140] Western blot analysis. To prepare whole cell lysates, cells were solubilized in RIPA buffer⁵⁵. For cytosolic fraction, cells were solubilized with hypotonic buffer containing protease and phosphatase inhibitors (10 mM Tris, 0.2 mM MgCl₂, pH 7.4) and kept on ice for 10 min. Cell lysates were mixed with sucrose buffer (final concentration; 25 mM Sucrose, 0.1 mM EDTA) and centrifuged at 20,000×g for 1 hour. Supernatant was used as cytosolic fraction. To prepare the membrane fraction, cells were solubilized with PBS containing protease and phosphatase inhibitors. The lysates were frozen at −80° C. for 1 h and thawed at room temperature. After three cycles, they were centrifuged at 13,000×g for 25 min. The pellet was suspended with membrane protein isolation buffer (20 mM Tris-HCl; 150 mM NaCl; 1 mM EDTA; 1 mM EGTA; and 1% Triton X-100, pH 7.5) containing protease and phosphatase inhibitors. Protein concentration was assessed by BCA protein assay kit (Thermo Scientific) and equal amounts of sample were separated by SDS-PAGE and transferred electrophoretically to nitrocellulose membranes. Membranes were blocked in 5% BSA in Tris-buffered saline. Thereafter, the membranes were immunoblotted with anti-PTEN (Cell signaling, #9559), anti-Akt (Cell signaling, #9272), anti-pSer473-Akt (Cell signaling, #9271), anti-β-catenin (BD Transduction Laboratories, 610153), anti-pSer552-β-catenin (Cell signaling, #9566P), or anti-α-actin (Santa Cruz, sc-47778), and developed with horseradish peroxidase-coupled anti mouse or rabbit IgG antibodies, followed by enhancement with SuperSignal West Dura Extended Duration Substrate Antibodies (Pierce Chemical Co.).

[0141] Generation of heparin-binding domain peptide. The synthetic peptide containing the mouse homologue of the heparin binding domain (AA246-249) and 9 additional amino acids of mouse IGFBP2, ²³⁷ KHLSLEEPKKLRP²⁵⁰ (referred to as HBD-peptide), and control peptide for HBD-peptide (AALSLEEPAALAP) were synthesized by the Protein Chemistry Core Facility at the University of North Carolina at Chapel Hill. The synthetic peptide for heparin-binding domain of IGFBP5 (²⁰¹RKGFYKRKQCKPSRGKRK²¹⁸) was generated in the same way. Purity and sequence confirmation were determined by mass spectrometry. The IGFBP-2 HBP-peptide was pegylated as follows: 10 mg of peptide was mixed with 380 ug of methoxy PEG maleimide (20000 kDa) (1:3 molar ratio peptide to PEG) (Jenkem Biotechnology) in 4.0 ml of 0.05M NaH₂PO₄, pH 7.0. Following an overnight incubation at 4° C., cysteine was added to a final concentration of 17 mM to block unreacted sites. To remove the nonpegylated peptide and cysteine the mixture was desalted using a Zebra Desalt spin column (Thermo Scientific) following the manufacturer's instructions. Pegylation was verified by SDS-PAGE analysis with Coomassie staining.

[0142] In vivo treatment of Igfbp2^{-/-} mice with pegylated heparin-binding peptide (PEG-HBD-peptide). Igfbp2^{+/+} and Igfbp2^{-/-} mice were administered with PBS or PEG-HBD-peptide (50 μg/day) intraperitoneally 5 times per week from 6 to 9 weeks of age. Dual-energy x-ray absorptiometry was performed before the initiation of treatment. Mice were injected with 20 mg/kg calcein intraperitoneally 7 days and 2 days before sample collection.

[0143] Dual-energy x-ray absorptiometry (DXA). Dual-energy x-ray absorptiometry (DXA) for whole body and femoral areal bone mineral density (aBMD) and body composition exclusive of the head were performed using the PIXImus (GE-Lunar)¹⁰. The PIXImus was calibrated daily with a mouse phantom provided by the manufacturer.

[0144] MicroCT. Microarchitecture of distal trabecular bone and midshaft cortical bone was analyzed with femurs and vertebrae (L5) by MicroCT (MicroCT40)¹⁰. Approximately 100 slices were measured just proximal to the distal growth plate, with an isotropic pixel size of 12 μm and slice thickness of 12 μm. Midshaft cortical bone thickness was analysis in a similar fashion using approximately 18 slices obtained at the exact midpoint of the femur.

[0145] Bone Histomorphometry. In vivo histomorphometry differences were analyzed between Igfbp2^{-/-} mice treated with PBS or PEG-HBD-peptide at 9 weeks of age, Mice were injected with 20 mg/kg calcein intraperitoneally 7 days and 2 days before sample collection. Femurs were analyzed as described previously¹⁰.

[0146] Femoral Biomechanics. Femoral biomechanical properties were compared by three-point bending between Igfbp2^{-/-} mice treated with PBS or PEG-HBD-peptide at 9 weeks of age. Load was applied at a constant rate (0.05 mm/sec) until failure. Failure load (newtons), bending stiffness (newtons per millimeter), and work-to-failure (newton-millimeters) from the load-displacement curve were measured and the apparent elastic modulus (megapascal) and ultimate strength (gigapascal) were measured using the relevant midfemoral cross-sectional geometry measured from μCT.

[0147] Statistical analysis. All data are expressed as the mean±Standard Error of the Mean (SEM). Results were analyzed for statistically significant differences using Student's t-test or ANOVA followed by Bonferroni multiple comparison post hoc test. The glucose tolerance test was analyzed using repeat measures ANOVA. Statistical significance was set at p<0.05.

[0148] The heparin-binding domain of IGFBP-2 stimulates in vitro osteoblastogenesis. It has been reported previously that Igfbp2^{-/-} mice exhibited an osteopenic phenotype with low bone formation and impaired osteoblastogenesis in bone marrow stromal cells (BMSCs) from Igfbp2^{-/-} mice compared to wild-type cells (FIG. 1a)¹⁰. Consistent with this, Igfbp2-deficient calvarial osteoblasts (COBs) exhibited impaired alkaline phosphatase (ALP) activity during osteoblastogenesis compared to wild-type cells (FIG. 1b). To investigate whether the heparin-binding domain (HBD) of IGFBP-2 has an anabolic effect on the skeleton, a small molecule (the HBD-peptide), which contains the HBD of IGFBP-2, was generated and tested for its effect on osteoblastogenesis in vitro. To confirm that the effect of HBD-peptide was specific, a control peptide was also made and analyzed for its effect on osteogenesis. The control peptide did not enhance mineralization of Igfbp2^{-/-} COBs compared to PBS-treated cells, whereas the HBD-peptide was fully active (FIG. 7). To prolong the half-life of the small molecule such that it was feasible to undertake in vivo studies, pegylation of the HBD-peptide was performed (PEG-HBD). Igfbp2^{-/-} COBs and BMSCs were cultured in osteogenic media (i.e., ascorbic acid and β-glycerol phosphate) in the presence of the PEG-HBD. PEG-HBD strongly enhanced osteogenesis of COBs and BMSCs as measured by alkaline phosphatase and Alizarin Red staining (FIG. 1c). Consistent with this, ALP, Runx2 and osteocalcin (OC) expression were enhanced in BMSCs treated with PEG-HBD compared to control treated cells (FIG. 1d).

[0149] The heparin-binding domain of IGFBP-2 stimulates periosteal expansion of metacarpals ex vivo. To further understand the anabolic effect of the HBD on the skeleton, metacarpals from 1 day old mouse were collected and incubated with osteogenic media in the absence of fetal calf serum and analyzed for the effects of HBD-peptide on skeletal growth. Bone accrual was evaluated by the longitudinal length of calcein incorporated area as well as width and length of metacarpals. The control peptide had no effect on calcein incorporated area, and length and width of metacarpals was comparable to the metacarpals treated with PBS. Hence PBS was used as the subsequent control for further studies (FIG. 8). As shown in FIG. 2a, IGFBP-2 and HBD-peptide significantly enhanced calcein incorporated area of metacarpals (FIGS. 2a and b). IGF-I also stimulated expansion of calcein incorporated area to a similar extent as IGFBP-2 and HBD-peptide (FIGS. 2a and b). When metacarpal bones were treated with IGF-I together with the HBD-peptide the metacarpals displayed further enhancement of calcein incorporated area. In addition, IGFBP-2 and HBD-peptide also increased the width of metacarpals, implying that IGFBP-2 has an important role in periosteal expansion (FIGS. 2c and d).

[0150] The heparin-binding domain of IGFBP-5 does not have an anabolic effect on the skeleton in vitro and ex vivo. Because other IGFBPs possess HBD regions as well as IGFBP-2, analyses were carried out to determine whether the osteogenic effect of the HBD peptide is specific for this region in IGFBP-2 or whether the HBD domain in other forms of IGFBPs also had this effect. For this purpose a peptide was prepared that contained the HBD region in IGFBP-5 (HBD-BP5) and its effect on osteoblastogenesis was determined. Igfbp2-deficient COBs were cultured in the presence of HBD-BP5 and it was determined that HBD-BP5 did not show any enhancement of mineralization compared to PBS-treated cell (FIG. 3a). Second, metacarpals were collected and treated with osteogenic media with or without HBD-BP5. HBD-BP5 did not have any effect on calcein incorporated area or length and width of metacarpals. These data indicate that the effect of the HBD on skeletal acquisition is likely specific to IGFBP-2.

The heparin-binding domain of IGFBP-2 rescues the osteopenic phenotype of Igfbp2^{-/-} mice in vivo by improving skeletal micro-architecture. Based on these in vitro and ex vivo observations studies were conducted to determine if the HBD-peptide could rescue the osteopenic phenotype of Igfbp2^{-/-} mice. For this purpose, Igfbp2^{-/-} mice were treated with PBS or PEG-HBD. Based on the half-life analysis of PEG-HBD (data not shown), 50 μg of PEG-HBD were administered 5 times per week for 3 weeks in mice from 6 to 9 weeks of age. Whole-body areal bone mineral density (aBMD) and bone mineral content (aBMC)/body weight (BW) analyzed by DXA were not different before initiation of treatment between Igfbp2^{-/-} mice treated with PBS or PEG-HBD (Table 3). As expected due to normal growth and consolidation, Igfbp2^{+/+} mice treated with PBS showed increased trabecular bone volume by microCT compared to Igfbp2^{-/-} mice treated with PBS. Treatment with the PEG-HBD enhanced whole body aBMD and aBMC/BW in Igfbp2^{-/-} mice (Table 4) although it did not reach statistical significance. On the other hand, microCT analysis revealed an increase in trabecular bone volume both in the distal femur and L5 vertebrae of Igfbp2^{-/-} mice treated with PEG-HBD vs PBS-treated Igfbp2^{-/-} mice. This was accompanied by increased trabecular thickness (FIG. 4a, Table 1, Table 5). Cortical thickness at the midshaft of the femur was not affected by administration of PEG-HBD, but total area analyzed at the level of the femur midshaft was increased in Igfbp2^{-/-} mice treated with PEG-HBD compared to PBS-treated Igfbp2^{-/-} mice. This is consistent with an effect of PEG-HBD on periosteal expansion in a manner similar to what was demonstrated in the ex vivo metacarpal assay (Table 1 and FIG. 2). The skeletal architectural changes were associated with a similar trend in bone strength. In the three point bending studies of the femur, Igfbp2^{-/-} mice treated with PEG-HBD had slightly higher bone stiffness and estimated Young's Modulus compared to PBS treated null mice (FIG. 4b). Furthermore, force at yield and displacement-at-yield were lower in the PEG-HBD treated animals compared to controls (FIG. 4b).

[0151] Histomorphometric analysis revealed that osteoblast number per bone perimeter was significantly increased, whereas osteoclast number per bone perimeter exhibited a decrease in Igfbp2^{-/-} mice treated with PEG-HBD vs PBS-treated Igfbp2^{-/-} mice (FIG. 4c, Table 6). Interestingly, the number of bone marrow adipocytes was reduced in Igfbp2^{-/-} mice treated with PEG-HBD, although PEG-HBD did not have a direct effect on whole body adiposity (FIG. 4d, Tables 3 and 4). The increase in osteoblast number of the Igfbp2^{-/-} mice treated with PEG-HBD coincident with the reduction in marrow adipocytes implies that allocation of mesenchymal stem cells may be altered towards the osteogenic lineage in mice treated with PEG-HBD. Consistent with this, Pparg expression was reduced in COBs treated with PEG-HBD (FIG. 4e).

[0152] In respect to the reduction in osteoclast number seen on histomorphometry from PEG-HBD treated mice, serum TRAP5b levels were also significantly decreased in Igfbp2^{-/-} mice treated with PEG-HBD (FIG. 4f). To investigate the mechanism whereby PEG-HBD affects osteoclasts, bone marrow stromal cells from Igfbp2^{-/-} mice were cultured and osteoclastogenesis was induced in the presence or absence of the HBD. PEG-HBD did not have a direct effect on osteoclastogenesis (data not shown). Second, Igfbp2^{-/-} COBs and BMSCs were collected and treated with PEG-HBD. PEG-HBD did not affect Opg expression, but it markedly suppressed Rankl expression (FIGS. 4g and h). These data imply that PEG-HBD reduces osteoclastogenesis indirectly through down-regulation of Rankl expression in osteoblasts.

[0153] The heparin-binding domain of IGFBP-2 suppresses PTEN expression and stimulates IGF-I/Akt signaling. There is evidence of a negative association between IGFBP-2 and PTEN expression in human cancer cells such as glioblastoma and prostate cancer¹⁸⁻²¹. In addition, PTEN expression has beef shown to be enhanced in Igfbp2 deficient osteoblasts¹⁰. These findings led to the speculation that IGFBP-2 negatively regulates PTEN expression and enhances IGF-I signaling in osteoblasts. First analyses were carried out to determine whether IGFBP-2 suppressed PTEN expression using primary Igfbp2^{-/-} COBs. It was found that full-length IGFBP-2 markedly suppressed PTEN expression in these cells (FIG. 5a). The control peptide had no effect on PTEN expression (FIG. 9), but much like IGFBP-2, PEG-HBD also induced a reduction in PTEN expression (FIG. 5b). Second, analyses were carried out to determine whether the reduction in PTEN expression resulted in enhanced IGF-I/Akt signaling. Western blot analysis for phosphorylation of Akt at serine 473 (pSer473-Akt) revealed that IGF-I stimulated Akt activation was impaired in Igfbp2^{-/-} COBs compared to Igfbp2^{+/+} COBs (FIG. 5c). Furthermore, pSer473-Akt was enhanced in Igfbp2^{-/-} COBs treated with PEG-HBD vs PBS-treated controls (FIG. 5d). These data indicate that IGFBP-2 enhances IGF-I stimulated/Akt activation by suppressing PTEN expression in part through the HBD.

[0154] The heparin-binding domain of IGFBP-2 stimulates IGF-I induced cytosolic β-catenin accumulation and Ser552 phosphorylation of β-catenin. Several lines of evidence demonstrate cross-talk between IGF-I signaling and β-catenin signaling in tumor cell lines²⁴⁻²⁷. Thus, it was hypothesized that IGF-I signaling stimulated β-catenin signaling and that HBD-peptide could enhance β-catenin signaling by suppressing PTEN expression in osteoblastic cells. Analyses were first carried out to determine whether IGF-I affects β-catenin accumulation in the cytosol of osteoblastic cells. Western blot analysis revealed that IGF-I reduced membrane-bound β-catenin expression and enhanced cytosolic accumulation of β-catenin in MC3T3-E1 cells (FIG. 6a). In addition, cytosolic accumulation of β-catenin in response to IGF-I was enhanced in Igfbp2^{-/-} COBs treated with PEG-HBD compared to PBS-treated control cells (FIG. 6b). This suggests that the HBD-peptide is involved in IGF-I/β-catenin signaling possibly by suppressing PTEN expression. Serine 552 (Ser552) phosphorylation of β-catenin, which can be induced by Akt has been shown to be important for dissociation of β-catenin from membrane and re-localization to cytoplasm and nucleus²⁸⁻³⁰. Based on this observation, studies were conducted to determine whether IGF-I stimulated Ser552 phosphorylation in β-catenin and if the HBD-peptide facilitates this response in osteoblastic cells. As shown in FIGS. 5c and d, IGF-I stimulated β-catenin phosphorylation on Ser552, and this response was enhanced in cells treated with PEG-HBD. Because activation of β-catenin is important for bone formation, the osteogenic effect of the HBD-peptide might be mediated by IGF-I β-catenin signaling in osteoblasts.

[0155] This study provides evidence that the heparin-binding domain of IGFBP-2 may be critical for the anabolic actions of IGFBP-2 on bone. The determination that the HBD suppresses PTEN expression in osteoblasts provides one mechanism by which IGFBP-2 could regulate cell fate. However, sorting the IGF-I dependent and independent activities of intact IGFBP-2 is challenging. IGF-I signaling is a prerequisite for skeletal acquisition and modulation of this signaling pathway results in alterations in skeletal homeostasis^{17,34-40}. Therefore, an anabolic effect of the HBD on the skeleton could in part be mediated by enhancement of IGF-1-induced activation of the PI3K/Akt pathway as a result of PTEN suppression. In addition, the increase in osteoblast number in HBD-treated Igfbp2^{-/-} mice could also be due to this mechanistic change since enhanced PI3K/Akt signaling in osteoblasts is involved in cell proliferation. In fact, Liu et al. showed that loss of PTEN in osteoblasts in vivo resulted in very high bone mass and increased osteoblast number¹⁷.

[0156] Although the HBD rescued the low osteoblast number in Igfbp2^{-/-} mice, osteoclast number was further diminished by administration of HBD. This observation is consistent with the observed increase in bone mass but suggests that bone turnover is not accelerated by HBD treatment. Indeed, mineral apposition rate and bone formation rate showed minimal changes in Igfbp2^{-/-} mice treated with HBD. In contrast to the HBD, IGF-I signaling has been shown to directly stimulate osteoclastogenesis, and prior data suggest that physiological levels of IGFBP-2 in the skeletal microenvironment are required for osteoclastogenesis⁴¹. It is possible that IGFBP-2 acts to maintain IGF-I concentrations within the pericellular niche but that the HBD, which lacks the IGF-I binding domain, may play a distinct role by inhibiting bone resorption when supraphysiologic concentrations are administered. Since the HBD does not directly suppress osteoclast differentiation in vitro, the underlying mechanism whereby the HBD decreases bone resorption is likely indirect and due to decreased Rankl expression in osteoblasts. Expression of Rankl is regulated by numerous factors including the Wnt/β-catenin signaling pathway⁴². Glass et al. reported that mice expressing the stabilized form of β-catenin exhibit increased trabecular bone volume with a reduction in osteoclast number primarily caused by an increased Opg/Rankl ratio⁴³. Consistent with this, targeted deletion of β-catenin in osteoblasts resulted in low bone mass with increased bone resorption⁴³. Thus, stabilization of β-catenin in osteoblasts increases bone mass not only by increasing Wnt mediated activation but also through suppression of bone resorption.

[0157] A reduction in PTEN expression has been shown to be associated with increased O-catenin in signaling. Inactivation of GSK3β (glycogen synthase kinase 3) by Akt has been proposed to be the key pathway by which Akt activation enhances β-catenin stabilization, whereas several lines of evidence demonstrate the important role of Ser 552 phosphorylation in β-catenin activation²⁸⁻³⁰. β-catenin is directly phosphorylated by Akt and Ser552 phosphorylation is important for cytosolic and nuclear accumulation of β-catenin, resulting in increased β-catenin transcriptional activity²⁸. He et al reported that loss of PTEN resulted in an excess of intestinal stem cells by stimulating β-catenin activity in part through Ser 552 phosphorylation²⁹. The current study demonstrated that IGF-I enhanced β-catenin accumulation in cytoplasm and phosphorylated ser552 of β-catenin in osteoblastic cells, and this response was further enhanced by the HBD. Taken together, these lines of evidence suggest that enhanced activation of β-catenin signaling may contribute to both increased bone formation and decreased bone resorption in Igfbp2^{-/-} mice treated with PEG-HBD.

[0158] In the PEG-HBD treated Igfbp2^{-/-} mice, osteoblast number was increased and this was accompanied by reduced number of marrow adipocytes. Mesenchymal cell allocation is an important step in regulating bone mass and marrow adiposity. Numerous factors are involved in this process including Wnt/β-catenin signaling and the transcription factor, PPAR-gamma⁴⁴. Activation of Wnt/β-catenin signaling favors osteoblastogenesis over adipogenesis in part by either sequestering PPAR-gamma or suppressing PPAR-gamma transcriptional activity⁴⁵⁻⁴⁷. Because HBD enhances β-catenin stability that is induced by IGF-I, the switch of mesenchymal cells towards the osteogenic lineage might explain the increased osteoblasts and reduced adipocytes in bone marrow from Igfbp2^{-/-} mice treated with PEG-HBD.

[0159] Nevertheless, the mechanism by which the HBD suppresses PTEN expression has not been defined. One possibility resides in the binding of HBD with the integrin receptor. Maile et al. reported that the heparin-binding domain of vitronectin bound to a cystein loop region of β3 integrin and modulated αVβ3 integrin signaling in smooth muscle cells⁴⁸. Furthermore, Perks et al. reported that PTEN down-regulation by IGFBP-2 might be mediated by an integrin receptor, although they did not demonstrate an interaction between IGFBP-2 and a specific integrin receptor or whether the HBD was involved in this interaction²⁰.

[0160] The presence of an RGD sequence motif in the C-terminus of IGFBP-2 has led to speculation that IGFBP-2 could bind to an integrin, independent of its IGF-binding³. Schutt et al. reported that IGFBP-2 binding to the cell surface was mediated through α5β1 integrin, and blocked by RGD-containing peptide in Ewing sarcoma and breast cancer cell lines⁴⁹. Wang et al. also showed that IGFBP-2 interacted with α5 integrin through an RGD motif in a human glioblastoma cell line⁵⁰. In contrast to these reports, Russo et al. and Pereira et al. independently reported that IGFBP-2 binding to extracellular matrix was independent of RGD sequences in neuroblastoma cells and breast cancer cells. In addition, Hoeflich et al. showed that the RGD motif is not involved in IGFBP-2 binding to plasma membrane in multiple organs⁵¹. Thus, the functional role of the RGD motif in Igfbp2^{-/-} mice remains controversial and further studies are needed.

[0161] Results using a supraphysiologic concentration of the HBD cannot be used to reach a definitive conclusion regarding the role of physiologic concentrations of IGFBP-2 in bone acquisition. However, it does suggest that this binding protein has unique properties that might explain the high circulating levels of IGFBP-2 during periods of rapid growth such as the first year of life and during puberty. In summary, these studies show that the HBD in IGFBP-2 has an anabolic effect on the skeleton and this effect is partially mediated by the suppression of PTEN expression and involves activation of β-catenin signaling. These lines of evidence provide new insights regarding the physiologic role of IGFBP-2 in bone and suggest that a small molecule such as the HBD-peptide could have potential as a pharmacological intervention for the treatment of osteoporosis.

### References for Example 8

[0162] 1. Hwa, V., Oh, Y. & Rosenfeld, R. G. The insulin-like growth factor-binding protein (IGFBP) superfamily. Endocr Rev 20, 761-87 (1999).
[0163] 2. Jones, J. I. & Clemmons, D. R. Insulin-like growth factors and their binding proteins: biological actions. Endocr Rev 16, 3-34 (1995).
[0164] 3. Firth, S. M. & Baxter, R. C. Cellular actions of the insulin-like growth factor binding proteins. Endocr Rev 23, 824-54 (2002).
[0165] 4. Hu, D. et al. Serum insulin-like growth factor-1 binding proteins 1 and 2 and mortality in older adults: the Health, Aging, and Body Composition Study. J Am Geriatr Soc 57, 1213-8 (2009).
[0166] 5. Hedbacker, K. et al. Antidiabetic effects of IGFBP2, a leptin-regulated gene. Cell Metab 11, 11-22.
[0167] 6. Wheatcroft, S. B. et al. IGF-binding protein-2 protects against the development of obesity and insulin resistance. Diabetes 56, 285-94 (2007).
[0168] 7. Hoeflich, A. et al. Growth inhibition in giant growth hormone transgenic mice by overexpression of insulin-like growth factor-binding protein-2. Endocrinology 142, 1889-98 (2001).
[0169] 8. Conover, C. A. et al. Subcutaneous administration of insulin-like growth factor (IGF)-II/IGF binding protein-2 complex stimulates bone formation and prevents loss of bone mineral density in a rat model of disuse osteoporosis. Growth Horm IGF Res 12, 178-83 (2002).
[0170] 9. Khosla, S. et al. Insulin-like growth factor system abnormalities in hepatitis C-associated osteosclerosis. Potential insights into increasing bone mass in adults. J Clin Invest 101, 2165-73 (1998).
[0171] 10. DeMambro, V. E. et al. Gender-specific changes in bone turnover and skeletal architecture in igfbp-2-null mice. Endocrinology 149, 2051-61 (2008).
[0172] 11. Arai, T., Busby, W., Jr. & Clemmons, D. R. Binding of insulin-like growth factor (IGF) I or II to IGF-binding protein-2 enables it to bind to heparin and extracellular matrix. Endocrinology 137, 4571-5 (1996).
[0173] 12. Russo, V. C., Bach, L. A., Fosang, A. J., Baker, N. L. & Werther, G. A. Insulin-like growth factor binding protein-2 binds to cell surface proteoglycans in the rat brain olfactory bulb. Endocrinology 138, 4858-67 (1997).
[0174] 13. Russo, V. C., Rekaris, G., Baker, N. L., Bach, L. A. & Werther, G. A. Basic fibroblast growth factor induces proteolysis of secreted and cell membrane-associated insulin-like growth factor binding protein-2 in human neuroblastoma cells. Endocrinology 140, 3082-90 (1999).
[0175] 14. Russo, V. C. et al. Insulin-like growth factor binding protein-2 binding to extracellular matrix plays a critical role in neuroblastoma cell proliferation, migration, and invasion. Endocrinology 146, 4445-55 (2005).
[0176] 15. Duan, C., Ding, J., Li, Q., Tsai, W. & Pozios, K. Insulin-like growth factor binding protein 2 is a growth inhibitory protein conserved in zebrafish. Proc Natl Acad Sci USA 96, 15274-9 (1999).
[0177] 16. Kawai, M. & Rosen, C. J. Insulin-like growth factor-I and bone: lessons from mice and men. Pediatr Nephrol 24, 1277-85 (2009).
[0178] 17. Liu, X. et al. Lifelong accumulation of bone in mice lacking Pten in osteoblasts. Proc Natl Acad Sci USA 104, 2259-64 (2007).
[0179] 18, Cohen, P. et al. Elevated levels of insulin-like growth factor-binding protein-2 in the serum of prostate cancer patients. J Clin Endocrinol Metab 76, 1031-5 (1993).
[0180] 19. Mehrian-Shai, R. et al. Insulin growth factor-binding protein 2 is a candidate biomarker for PTEN status and PI3K/Akt pathway activation in glioblastoma and prostate cancer. Proc Natl Acad Sci USA 104, 5563-8 (2007).
[0181] 20. Perks, C. M., Vernon, E. G., Rosendahl, A. H., Tonge, D. & Holly, J. M. IGF-II and IGFBP-2 differentially regulate PTEN in human breast cancer cells. Oncogene 26, 5966-72 (2007).
[0182] 21. Levitt, R. J., Georgescu, M. M. & Pollak, M. PTEN-induction in U251 glioma cells decreases the expression of insulin-like growth factor binding protein-2. Biochem Biophys Res Commun 336, 1056-61 (2005).
[0183] 22. Sakata, T. et al. Skeletal unloading induces resistance to insulin-like growth factor-I (IGF-I) by inhibiting activation of the IGF-I signaling pathways. J Bone Miner Res 19, 436-46 (2004).
[0184] 23. Shoba, L. N. & Lee, J. C. Inhibition of phosphatidylinositol 3-kinase and p70S6 kinase blocks osteogenic protein-1 induction of alkaline phosphatase activity in fetal rat calvaria cells. J Cell Biochem 88, 1247-55 (2003).
[0185] 24. Jin, T., George Fantus, I. & Sun, J. Wnt and beyond Wnt: multiple mechanisms control the transcriptional property of beta-catenin. Cell Signal 20, 1697-704 (2008).
[0186] 25. Desbois-Mouthon, C. et al. Insulin and IGF-1 stimulate the beta-catenin pathway through two signalling cascades involving GSK-3beta inhibition and Ras activation. Oncogene 20, 252-9 (2001).
[0187] 26. Playford, M. P., Bicknell, D., Bodmer, W. F. & Macaulay, V. M. Insulin-like growth factor 1 regulates the location, stability, and transcriptional activity of beta-catenin. Proc Natl Acad Sci USA 97, 12103-8 (2000).
[0188] 27. Amin, S. et al. High serum IGFBP-2 is predictive of increased bone turnover in aging men and women. J Bone Miner Res 22, 799-807 (2007).
[0189] 28. Fang, D. et al. Phosphorylation of beta-catenin by AKT promotes beta-catenin transcriptional activity. J Biol Chem 282, 11221-9 (2007).
[0190] 29. He, X. C. et al. PTEN-deficient intestinal stem cells initiate intestinal polyposis. Nat Genet. 39, 189-98 (2007).
[0191] 30. Taurin, S., Sandbo, N., Qin, Y., Browning, D. & Dulin, N. O. Phosphorylation of beta-catenin by cyclic AMP-dependent protein kinase. J Biol Chem 281, 9971-6 (2006).
[0192] 31. Glass, D. A., 2nd & Karsenty, G. Molecular bases of the regulation of bone remodeling by the canonical Wnt signaling pathway. Curr Top Dev Biol 73, 43-84 (2006).
[0193] 32. Eckstein, F. et al. Insulin-like growth factor-binding protein-2 (IGFBP-2) overexpression negatively regulates bone size and mass, but not density, in the absence and presence of growth hormone/IGF-I excess in transgenic mice. Anat Embryol (Berl) 206, 139-48 (2002).
[0194] 33. Palermo, C. et al. Potentiating role of IGFBP-2 on IGF-II-stimulated alkaline phosphatase activity in differentiating osteoblasts. Am J Physiol Endocrinol Metab 286, E648-57 (2004).
[0195] 34. Fujita, T. et al. Runx2 induces osteoblast and chondrocyte differentiation and enhances their migration by coupling with PI3K-Akt signaling. J Cell Biol 166, 85-95 (2004).
[0196] 35. Peng, X. D. et al. Dwarfism, impaired skin development, skeletal muscle atrophy, delayed bone development, and impeded adipogenesis in mice lacking Akt1 and Akt2. Genes Dev 17, 1352-65 (2003).
[0197] 36. Liu, J. P., Baker, J., Perkins, A. S., Robertson, E. J. & Efstratiadis, A. Mice carrying null mutations of the genes encoding insulin-like growth factor I (Igf-1) and type 1 IGF receptor (Igf1r). Cell 75, 59-72 (1993).
[0198] 37. Yakar, S. et al. Circulating levels of IGF-1 directly regulate bone growth and density. J Clin Invest 110, 771-81 (2002).
[0199] 38, Zhang, M. et al. Osteoblast-specific knockout of the insulin-like growth factor (IGF) receptor gene reveals an essential role of IGF signaling in bone matrix mineralization. J Biol Chem 277, 44005-12 (2002).
[0200] 39. Zhao, G, et al. Targeted overexpression of insulin-like growth factor Ito osteoblasts of transgenic mice: increased trabecular bone volume without increased osteoblast proliferation. Endocrinology 141, 2674-82 (2000).
[0201] 40. Mukherjee, A. & Rotwein, P. Akt promotes BMP2-mediated osteoblast differentiation and bone development. J Cell Sci 122, 716-26 (2009).
[0202] 41. Wang, Y. et al. Role of IGF-I signaling in regulating osteoclastogenesis. J Bone Miner Res 21, 1350-8 (2006).
[0203] 42. Kearns, A. E., Khosla, S. & Kostenuik, P. J. Receptor activator of nuclear factor kappaB ligand and osteoprotegerin regulation of bone remodeling in health and disease. Endocr Rev 29, 155-92 (2008).
[0204] 43. Glass, D. A., 2nd et al. Canonical Wnt signaling in differentiated osteoblasts controls osteoclast differentiation. Dev Cell 8, 751-64 (2005).
[0205] 44. Gesta, S., Tseng, Y. H. & Kahn, C. R. Developmental origin of fat: tracking obesity to its source. Cell 131, 242-56 (2007).
[0206] 45. Liu, J., Wang, H., Zuo, Y. & Farmer, S. R. Functional interaction between peroxisome proliferator-activated receptor gamma and beta-catenin. Mol Cell Biol 26, 5827-37 (2006).
[0207] 46. Bennett, C. N. et al. Regulation of osteoblastogenesis and bone mass by Wnt10b. Proc Natl Acad Sci USA 102, 3324-9 (2005).
[0208] 47. Ross, S. E. et al. Inhibition of adipogenesis by Wnt signaling. Science 289, 950-3 (2000).
[0209] 48. Maile, L. A. et al. Modulation of integrin antagonist signaling by ligand binding of the heparin-binding domain of vitronectin to the alphaVbeta3 integrin. J Cell Biochem 105, 437-46 (2008).
[0210] 49. Schutt, B. S., Langkamp, M., Rauschnabel, U., Ranke, M. B. & Elmlinger, M. W. Integrin-mediated action of insulin-like growth factor binding protein-2 in tumor cells. J Mol Endocrinol 32, 859-68 (2004).
[0211] 50. Wang, G. K., Hu, L., Fuller, G. N. & Zhang, W. An interaction between insulin-like growth factor-binding protein 2 (IGFBP2) and integrin alpha5 is essential for IGFBP2-induced cell mobility. J Biol Chem 281, 14085-91 (2006).
[0212] 51. Hoeflich, A. et al. Mutation of the RGD sequence does not affect plasma membrane association and growth inhibitory effects of elevated IGFBP-2 in vivo. FEBS Lett 523, 63-7 (2002).
[0213] 52. Wood, T. L., Rogler, L. E., Czick, M. E., Schuller, A. G. & Pintar, J. E. Selective alterations in organ sizes in mice with a targeted disruption of the insulin-like growth factor binding protein-2 gene. Mol Endocrinol 14, 1472-82 (2000).
[0214] 53. Rosen, C. J. et al. Congenic mice with low serum IGF-I have increased body fat, reduced bone mineral density, and an altered osteoblast differentiation program. Bone 35, 1046-58 (2004).
[0215] 54. Mukherjee, A. & Rotwein, P. Insulin-like growth factor-binding protein-5 inhibits osteoblast differentiation and skeletal growth by blocking insulin-like growth factor actions. Mol Endocrinol 22, 1238-50 (2008).
[0216] 55. Kawai, M. et al. Growth hormone stimulates adipogenesis of 3T3-L1 cells through activation of the Stat5A/5B-PPARgamma pathway. J Mol Endocrinol 38, 19-34 (2007).

### Example 9

### Efficacy of the Peptide in Inhibiting Fat Accumulation

[0217] A variety of data in the literature support that IGFBP-2 inhibits fat accumulation. These data include studies in which IGFBP-2 was overexpressed in mice; that is transgenic mice that produced excessive IGFBP-2 were created. These animals had decreased fat mass. Importantly when they were fed a high fat diet which normally induces glucose intolerance, they maintained normal glucose tolerance compared to control mice that were fed the same high fat diet and developed hyperglycemia. This suggests that IGFBP-2 protects against insulin resistance. In contrast the mice in which the IGFBP-2 gene was deleted had the opposite phenotype; that is they were significantly fatter than control mice. After 24 weeks the IGFBP-2 knockout mice weighed 37±1.5 gm whereas control animals weighed 32±1.3 gm. After 52 weeks this difference was maintained. This is a highly significant difference in total body weight. More importantly when fat mass was analyzed by DEXA scanning almost the entire difference in body weight was due to a difference in fat mass. At 26 weeks the percent body fat in the control mice was 16.1±1.4% fat whereas in the knockout mice it was 24.2±1.1%. Again this is a highly significant difference and indicates that much of the difference in weight was due to a difference in fat. Glucose tolerance testing showed that the IGFBP-2 gene deletion mice had glucose intolerance and were less sensitive to the administration of insulin. This indicates that the increased fat mass caused increased resistance to the hormone insulin. Blood insulin levels were higher in the IGFBP-2 knockout mice showing they had insulin resistance which resulted in high serum insulin concentrations. This has been shown by others to be an important risk factor for cardiovascular disease.

[0218] Further experiments have been carried out in which the knockout mice and control animals have been administered the mouse homologue of the heparin binding peptide. The peptide was administered to 8 animals in each group. The 6 week treatment data are provided in Table 2. The knockout animals weighed 30.4±1.5 gm whereas the control animals weighed 25.2±1.1 gm. The knockout animals that received the active peptide weighed 24.9±1.3 gm. This clearly indicated that administration of peptide which was given at a dose of 50 mcg administered intraperitoneally three days per week was effective in preventing weight gain. More importantly when absolute fat mass was analyzed by MRI, highly significant differences were also present. The knockout mice had 6.21±0.76 grams of fat. The control mice had 3.82±0.67 grams and the knockout mice administered the heparin binding peptide had 3.67±0.36 grams. Again these are highly significant differences. Glucose tolerance tests were also performed in these animals and showed that the knockout animals have impaired glucose tolerance and this was significantly improved with administration of the peptide and not significantly different from control mice.

### Example 10

### Global Deletion of IGFBP-2 Disrupts Hematopoiesis and Compromises Bone Marrow Engraftment in Lethally Irradiated Mice

[0219] Studies were carried out to determine if global deletion of IGFBP2 (BP2) might disrupt steady-state hematopoiesis and interfere with the engraftment of bone marrow donor cells. Peripheral blood and spleen cells from male (M) and female (F) WT and BP2−/− mice were first analyzed by flow cytometry for the major white blood cell (WBC) populations. In peripheral blood, BP2−/−F-mice had significantly lower CD3+ T cells compared to WT-F and BP2−/− M (p=0.02) while BP2−/−M had significantly increased CD3+ T cells (p=0.03), CD19+ B cells (p=0.00), F480+ macrophages (p=0.00), CD11b+ monocytes (p=0.00) and LY6G+ neutrophils (p=0.02) compared to both WT-M and BP2−/−F. Intraperitoneal injection of IGFBP-2 heparin binding domain (HBD) peptide reduced the percentage of macrophages (p=0.01) and neutrophils (p=0.02) in peripheral blood of BP2−/− M compared to PBS injected controls. BP2−/−F splenic CD3+ T cells were increased (p=0.0) and CD19+ B cells were decreased (p=0.05) compared to WT-F, WT-M and BP2−/−M. There was a significant increase in B220+ B cell progenitor cells in the spleens of BP2−/− M compared to WT-M but no difference in the percentages of all other mature WBC populations. Bone marrow transplants into lethally irradiated WT and BP2−/− male recipients were next performed. In non-competitive transplants, the efficiency of donor engraftment was the same for both strains as ≧75% of the repopulating cells in both WT and BP2−/− were of donor origin (Ly5.1+). In competitive repopulation transplants, support donor cells from LY5.1+ mice were mixed with competitor donor cells from either WT or BP2−/− in 2:3 and 1:3 ratios and transplanted into strain specific recipients. At 8 weeks post transplant, WT recipients in which ⅔ of the donor cells were WT (LY5.2+), 75% of bone marrow cells were of WT origin (LY5.2+) while in BP2−/− recipients in which ⅔ of the donor cells were from BP2−/− (LY5.2+) only 56% of bone marrow cells were LY5.2+ at 8 weeks post transplant representing 20% less (p=0.01) engraftment of BP2−/− donor cells compared to WT. These data confirm that IGFBP2 may be an important regulator of the hematopoietic stem cell niche.

### Example 11

### IGFBP-2 from Mesenchymal Stromal Cells (MSCs) in the Bone Marrow Niche Regulates Hematopoietic Stem Cell Proliferation and Marrow Engraftment

[0220] IGFBP2 (BP2) is one of 6 IGF binding proteins that shuttles IGFs to their respective receptors. PTH has been shown to induce IGFBP2 synthesis in calvarial osteoblasts and global deletion of BP2 results in small spleens, very low bone formation, impaired bone resorption and increased marrow adiposity. In vitro, bone marrow from bp2−/− mice show impaired recruitment of both osteoblasts and osteoclasts. BP2 null males also have a hematopoietic phenotype in which increased percentages of lymphoid and myeloid subpopulations are found in both the peripheral blood and spleen. Studies were conducted to determine if BP2 serves a critical role as a proliferative factor in the bone marrow niche. Using RNA from purified mouse mesenchymal stem cells (Stem Cell Technologies), it was first determined that BP2 gene expression levels were 6-8 times higher than in purified B or T cells. Non competitive bone marrow transplants (BMT) were performed by transplanting LY 5.1+ donor cells into lethally irradiated WT and bp2−/− recipients. Donor engraftment was not different between strains as shown by greater than 70% donor cells present in the peripheral blood of recipient mice from both strains. However, in competitive repopulation transplantation using same strain donor-recipient pairs, bp2−/− donor cells engrafted bp2−/− recipient bone marrow 30% less efficiently (P=0.01) than WT transplants. In addition, there were significantly fewer mature lymphoid (CD3, CD19) and myeloid (CD11b, LY6G and F480) cells in the peripheral blood of bp2−/− recipients (p≦0.05). In response to administration of a single component of the IGFBP2 molecule, the heparin binding domain (HBD), to bp2−/− mice, trabecular bone mass was rescued and osteoblast number increased. Importantly, in vivo administration of the HBD suppressed the percentages of mature monocytes, macrophages and neutrophils in the peripheral circulation, comparable to those found in WT mice. Taken together these data demonstrate that BP2, which is synthesized by MSCs and inducible by PTH, is a potent regulator of hematopoiesis and may specifically control stem cell fate in an IGF binding independent manner within the marrow niche. Niche regulation by IGFBP2 may be therapeutically important to clinical bone marrow transplantation which is currently the only treatment option for many hematologic and solid tissue malignancies.

### Example 12

### Regulation of Hematopoietic Stem Cells by the Heparin Binding Domain of IGFBP-2

[0221] The following studies are described to determine the role of IGFBP-2, through its heparin binding domain, in enhancing the success of bone marrow transplantation by stimulating hematopoietic bone marrow repopulation.

[0222] Rationale. Hematopoietic stem cell transplantation is used primarily in the treatment of hematopoietic cancers (leukemias and lymphomas), following high dose chemotherapy for non hematopoietic malignancies. It is also used for diseases involving genetic or acquired bone marrow failure, such as aplastic anemia and autoimmune diseases. Positive transplant outcomes are dependent upon (1) retrieval of sufficient numbers of hematopoietic stem cells (HSCs) from donor bone marrow, cord blood or peripheral blood and (2) successful homing of HSCs to the recipient's bone marrow¹. IGFBP-2 has been shown to be a necessary factor for the in vitro proliferation of both human and murine hematopoietic stem cells^{2,3}. Consistent with this result, it has been found that global deletion of IGFBP-2 in mice results in compromised repopulation of the bone marrow following lethal irradiation. A peptide unique to the heparin binding domain (HBD) of IGFBP-2 has been synthesized and it has been demonstrated that this peptide has the ability to increase osteoblast and bone marrow stromal cell numbers in vitro and to enhance bone formation in vivo independently of IGF signaling. These studies investigate the role of the HBD of IGFBP-2 in hematopoietic stem cell transplantation, a critical component of therapeutic anti-cancer regimens.

[0223] Significance. Successful bone marrow transplantation is an important therapeutic option for both hematologic and solid tissue neoplasms. For example, a major advance in treating multiple myeloma has been the transplantation of bone marrow hematopoietic stem cells (HSCs). Propagation of HSCs prior to transplant increases the likelihood of successful engraftment and re-establishment of steady state hematopoiesis⁴. IGFBP-2 has been shown to be a potent stimulus for the in vitro proliferation of mouse and human hematopoietic stem cells^{2,3}. However, the mechanism responsible for this effect is unknown. Recent studies have established the importance of IGFBP-2 for successful in vivo bone marrow transplantation as well as its capacity to stimulate mesenchymal stromal cell (MSC) differentiation. The studies described herein are intended to elucidate the pathways through which IGFBP-2 increases HSC proliferation and enhances establishment of the hematopoietic stem cell niche. As HSC transplantation is widely used as a therapy for both hematopoietic and non hematopoietic malignancies, these studies should have broad therapeutic implications.

[0224] Background. The potential of the stem cell niche to respond to stress and injury requires not only HSCs but also bone forming osteoblasts^{5,6}. Insulin-Like Growth Factor Binding Protein 2 (IGFBP-2) is one of six IGF binding proteins (IGFBP 1-6) that regulates the bioavailability of the proliferative growth factors IGF-I and IGF-II. Studies have established the importance of IGFBP-2 in regulating osteoblast proliferation and differentiation⁷. Preliminary evidence suggests that IGFBP-2 can act independently of IGF, but the mechanisms underlying these actions have yet to be investigated. For example, cell mobility in glioblastoma appears to be mediated by the binding of IGFBP-2 to the integrin α5 receptor via the Arg-Gly-Asp (RGD) domain⁸. In addition, proteolytic cleavage of IGFBP2 results in small fragments that include the heparin binding domain (HBD). When the HBD binds to the extracellular matrix, it can stimulate the proliferation and metastatic behavior of neuroblastoma cells⁹. A small molecule containing the HBD present in the linker region of IGFBP-2 has been synthesized. Of the two HBDs in this molecule, the one synthesized is unique to IGFBP-2 and is not represented in other IGFBPs. This peptide is studied for its effect on HSC proliferation, migration, and bone marrow homing with the ultimate goal of defining the usefulness of the HBD as an adjuvant for HSC transplantation therapies.

[0225] Data in Support of Proposed Investigation. In the context of bone formation, the IGF independent actions of IGFBP-2 were investigated using a synthesized peptide of the HBD contained in the linker region of IGFBP-2. This peptide is distinct from the other IGF binding proteins. In vitro, the HBD peptide rescued the low bone mineralization phenotype of Igfbp2−/− bone marrow stromal cells and calvarial osteoblasts (FIG. 10) and stimulated periosteal expansion and growth in ex vivo explants of Igfbp2−/− metacarpals. In vivo, the HBD peptide rescued the low bone mass phenotype of Igfbp2−/− mice, as seen by increased osteoblast number, restored bone mass, and improved bone strength (FIG. 11).

[0226] In addition to its actions on mesenchymal cells, IGFBP-2 has been shown to be a necessary factor for the in vitro proliferation of murine and human hematopoietic stem cells. Global deletion of IGFBP-2 results in altered hematopoiesis such that the peripheral blood and spleen of Igfbp2−/− mice contain significantly increased B lymphocytes and myeloid lineage cells. In vivo administration of the HBD reduced the number of differentiated lymphoid and myeloid cells to the baseline percentages of PBS injected controls (FIG. 12). Furthermore, in competitive repopulation bone marrow transplants, Igfbp2−/− donor cells failed to efficiently repopulate the bone marrow of same strain recipients (FIG. 13).

[0227] Taken together, these findings indicate that the HBD may be an important component of IGFBP-2 signaling to enhance cell proliferation and suppress differentiation in HSCs. The studies described herein are to determine if the growth promoting effects of IGFBP-2 on HSCs are mediated through the HBD and are independent of the actions of IGF-I.

### Investigation of the Effect of the IGFBP-2 Heparin Binding Domain Peptide (HBD) on Hematopoietic Stem Cell Proliferation and Differentiation In Vitro.

[0228] Rationale: Increasing the number of long term (LT) HSCs in donor bone marrow cell preparations prior to bone marrow transplantation improves transplantation outcomes. In vitro, IGFBP-2 acts to increase the proliferation of HSCs, but the mechanism underlying this effect is unknown. IGFBP-2 has been shown to act independently of IGF-1 signaling via the RGD and HBD domains. Using a synthesized HBD peptide unique to IGFBP-2, the ability of the HBD to increase the proliferation of human and murine HSCs and maintain the HSCs in an undifferentiated state will be tested. To delineate IGFBP-2 independent effects, the HBD will be tested in vitro on mouse HSCs collected from both Igfbp2−/− and Igfbp2+/+ mice.

[0229] Design and Methods: The Igfbp2−/− mouse was created by Dr. John Pintar in the 1990s and then backcrossed to B6 by Dr. Terri Wood in the early 2000s. These mice were obtained from Dr. Wood and they continued to be backcrossed to C57BL6 at The Jackson Laboratory. The HBD peptide and scrambled control peptide are provided by David Clemmons, MD, at UNC Chapel Hill. To extend the short half-life, the HBD has been pegylated. In vitro experiments have demonstrated that HBD and the pegylated HBD are identical in their ability to stimulate osteoblast proliferation and differentiation. Human HSCs isolated from cord blood will be purchased from Stem Cell Technologies and cultured in Methocult stem cell media, according to the manufacturer's instructions. Murine bone marrow stromal cells (BMSC) will be recovered from the femurs of Igfbp2−/− and Igfbp2+/+ mice. BMSC will be stained with fluorescently conjugated antibodies and HSCs isolated using the FACSAria cell sorter. HSCs will be defined as Lin⁻ CD34⁻ Sca-1⁺ Kit⁺ Flk-2⁻. Twenty HSCs from each strain will be cultured in StemSpan serum free media (Stem Cell Technologies) supplemented with heparin, stem cell factor, thrombopoietin, and FGF-1, as previously reported³. HBD, full length IGFBP-2, or scrambled control peptide will be added to cell cultures at predetermined concentrations and for optimized exposure time. At day 10 of culture, cell proliferation for test specimens and controls will be quantified by the uptake of H³ Thymidine as counts of radioactivity per minute using the L56500 Liquid Scintillation Counter. Results will be expressed as the average of triplicate tests. Cells will also be analyzed by flow cytometry to determine percentages of short term (ST) and long term (LT) hematopoietic stem cells as defined by CD34⁺ Sca-1⁺ Thy1.1^{+/lo} c-kit⁺ lin⁻ CD135⁻ Slamf1/CD150⁺ CD11b^{lo} and CD34⁻ Sca-1⁺ Thy1.1^{+/lo} c-kit⁺ lin⁻ CD135⁻ Slamf1/CD150⁺ respectively. To confirm that HSCs remain undifferentiated in culture, percentages of differentiated cells will also be determined by flow cytometry using antibodies to lineage specific markers including Ter119 (erythrocytes) LY6G (Gr-1, myeloid), CD3 (T cell), CD19 (B cell) and CD11b (Mac-1, macrophage). Percentages will be based on collection of 20,000 events using the FACSCalibur flow cytometer. Cell culture experiments will be repeated three times. Analysis of variance (ANOVA) will be used to assess differences across groups. The confidence interval will be set at 95% (p≦0.05).

### Investigation of Whether the Effects of the HBD on Hematopoietic Stem Cells are Independent of IGF Signaling.

[0230] Rationale. IGF-I is a growth promoter for both normal and malignant cells. Elevated serum levels of IGFBP-2 are recognized as a poor prognostic indicator in recurrent metastatic disease and in childhood acute myelogenous leukemia following hematopoietic stem cell transplantation^{10,11}. It is, therefore, important to determine if the effects of IGFBP-2 on HSC expansion in vitro are independent of IGF signaling and whether there is synergy between IGF and IGFBP-2 with respect to cell signaling.

[0231] Design and Methods: HSCs will be cultured from murine bone marrow stromal cells, as described herein. IGF signaling will be inhibited by blocking the IGF receptor using the alpha IR-3 antibody in murine HSC cultures. The alpha IR-3 antibody used in these experiments has been published as effectively blocking IGF signaling in a variety of cell types, including murine hematopoietic stem cells¹². In these experiments, successful blocking of the IGF receptor will be assessed by adding IGF 1 to cell cultures and measuring cell proliferation by H³ Thymidine uptake. Following confirmation of receptor blocking, HBD, scrambled peptide and full length IGFBP-2 will be added to HSC cultures, and cell proliferation quantified by H3 Thymidine uptake. Data will be analyzed by ANOVA as described herein.

### Investigation of What Signaling Events are Initiated in Hematopoietic Stem Cells by the HBD of IGFBP-2.

[0232] Rationale. HBD has been shown to increase osteoblast proliferation by decreasing PTEN expression and increasing AKT phosphorylation. The mechanisms by which IGFBP-2 increases HSC proliferation have not been determined. Osteoblasts and hematopoietic cells reside together in close proximity in the bone marrow, and many cell signaling pathways are common to both the bone and hematopoietic niches. To determine the signaling events activated by the HBD, gene expression profiling will be performed on HSC cell cultures with and without the HBD, scrambled peptide, and full length IGFBP-2. Through PCR gene arrays, the contribution of cell proliferation and/or inhibition of apoptosis to HSC expansion will be determined.

[0233] Design and Methods: HSCs will be exposed to HBD, full length IGFBP-2, and a scrambled peptide, as described herein. RNA will be extracted from cultured HSCs on day 10 of culture. cDNA will be prepared using the RT2 First Strand Kit (SABiosciences, Frederick, Md.), according to the manufacturer's directions. A small aliquot (i.e., 25 ul) of the experimental cocktail consisting of cDNA, Syber Green RT2 qPCR Master Mix (SABiosciences) will be added to each well of the PCR array in a 96 well plate format (SABiosciences). PCR amplification will be performed using the Bio-Rad iQ5 thermocycler at the following settings: one cycle for 10 minutes at 95° C., followed by 40 cycles of 15 seconds each at 95° C. and 40 cycles of one minute each at 60° C. Baseline and threshold values will be determined manually. The ΔΔCt (delta threshold change) will be calculated for each gene using the SABiosciences PCR Array Data Analysis Web Portal (http://www.SABiosciences.com). A fold change greater than 1 between the experimental ΔCt (delta threshold change) and the control ΔCt will be considered up-regulation of the gene. A fold change less than 1 will be considered down-regulation of the gene. Ct values above 35 will be considered negative. PCR arrays will be performed for apoptosis, hematopoietic stem cells and hematopoiesis, and the PI3K-Akt, Wnt, MAP Kinase and Insulin signaling pathways.

### Investigation of the Effect of the HBD of IGFBP-2 on Bone Marrow Transplantation in Vivo.

[0234] Determination of Whether the HSCs are Expanded In Vitro Using the HBD of IGFBP-2 Functional in Bone Marrow Transplantation.

[0235] Rationale: While it is important that HSCs remain undifferentiated prior to transplant, successful transplantation is dependent upon a sufficient number of HSCs homing to the bone marrow and differentiating first into progenitor cells and eventually into mature and functional erythrocytes and white blood cells. The ability of the HSCs expanded in vitro by the HBD peptide to repopulate the bone marrow and to maintain steady state hematopoiesis when transplanted into lethally irradiated recipient mice will be tested.

[0236] Design and Methods: Murine HSCs collected from Igfbp2+/+ mice and expanded in vitro by the HBD peptide will be transplanted into Igfbp2+/+ mice. HSCs from human cord blood also expanded by the HBD peptide will be transplanted into non-obese, diabetic, severe combined immunodeficient (NOD/SCID) mice, a strain commonly used for transplantation studies of human bone marrow cells. Recipient mice will receive a lethal dose (10 Gy for IGFBP2+/+) or sublethal dose (3.5 Gy for NOD/SCID) of irradiation by exposure to a Cesium source using the J.L Shepherd 143-45 Irradiator in two sessions and with 4 hours between sessions. Human and murine HSCs will be expanded in culture for 10 days, counted, and resuspended in PBS at a concentration of 10×10⁶ cells/mL. 30 uL of donor HSCs will be transplanted into the retro orbitus of recipient mice. At 8 weeks post transplant, peripheral blood of recipient mice will be tested for successful bone marrow engraftment by determining the percentage of LY5.2+ murine donor cells and CD45/71+ human donor cells by flow cytometry in Igfbp2+/+ and NOD/SCID mice respectively. The presence of ≧80% donor cells will be indicative of successful engraftment. Recipient mice will be sacrificed at 16 weeks post transplant. Percentages of the major blood cell populations will be determined in peripheral blood by flow cytometry using conjugated antibodies to Ter 119 (erythrocytes), LY6G (Gr-1, myeloid), CD3 (T cell), CD19 (B cell), and CD11b (Mac-1, macrophage). As a functional test of successful engraftment and an assessment of the self renewal potential of transplanted HSCs, bone marrow cells will be collected from one femur of recipient mice at 16 weeks post transplant and used as the donor cells for a second set of transplant recipients. These second set recipients will be monitored as described for the original transplants. Three mice for each test and control condition will be transplanted, and transplants will be performed in at least 2 independent experiments for an N=6 for each experimental condition. ANOVA will be used to analyze differences between groups as previously described.

[0237] Investigation of Whether the HBD Increases the Efficiency of Bone Marrow Repopulation Following Myeloablation in Igfbp2−/− Mice.

[0238] Rationale. It has been shown that global deletion of IGFBP-2 in Igfbp2−/− bone marrow transplant recipients does not preclude successful engraftment of IGFBP-2 positive donor cells. However, as seen in competitive repopulation transplant experiments, donor cells from Igfbp2−/− mice engraft 30% less efficiently when compared with Igfbp2+/+ donor cells. Taken together, these data implicate IGFBP-2 as an important regulator of HSC homing to the bone marrow and a contributor to establish HSCs within the hematopoietic stem cell niche. Both of these steps are required for successful transplantation. The goal in these experiments is to rescue the decreased engraftment efficiency of Igfbp2−/− donor cells by co-administering HBD peptide to Igfbp2−/− transplant recipients. These experiments will serve as a functional test of the ability of the HBD to improve engraftment of bone marrow cells.

[0239] Design and Methods: The LY5.1/LY5.2 gene system will be used in competitive experiments to repopulate the bone marrow and distinguish donor engrafted bone marrow cells from recipient endogenous bone marrow cells. The B6.SJL-Ptprc^{a}pepc^{b}/BoyJ mouse strain (LY5.1 positive) will be used as the source of competitor bone marrow donor cells. All recipient mice will be LY5.2 positive. Donor and recipient mice will be male and 8 weeks of age at the time of transplant. To obtain donor bone marrow cells, mice will be sacrificed, and the femurs will be recovered aseptically. Bone marrow cells will be collected, washed, and resuspended in phosphate buffered saline (PBS) at a concentration of 0.3×10⁶ cells per 30 uL injection volume. For competitive repopulation transplants, LY5.1+ donor cells are mixed with LY5.2+ (Igfbp2−/− or Igfbp2+/+) donor cells at 1:0 (100% LY5.1 donor cells, positive control), 1:3 and 1:6 ratios. The HBD peptide, scrambled peptide, or full length IGFBP2 will be added to donor cell preparations at a concentration optimized in previous in vivo experiments (50 ug/30 uL). Recipient mice will be irradiated lethally and transplanted, as described herein. At 8 weeks post transplant, percentages of LY5.1 positive and LY5.2 positive engrafted donor cells will be determined in peripheral blood by flow cytometry. Transplant recipients will be sacrificed at 16 weeks post transplant, and white blood cell populations analyzed by flow cytometry. HSCs present in the bone marrow will be quantified and sorted using the FACSAria cell sorter. Sorted cells will be cultured and the number of colony forming units determined in a standard colony forming cell culture assay (Stem Cell Technologies). In addition, functionality of transplanted HSCs will be assessed by a second set of transplants, which will be performed as described herein. Three mice for each test and control condition will be transplanted, and transplants will be performed in at least 2 independent experiments for an N=6 for each experimental condition. ANOVA will be used to assess statistical significance between group means of test (Igfbp2−/−) and control (Igfbp2+/+) recipients. The confidence interval will be set at ≦0.05.

### Reference List for Example 12

[0240] 1. Jenq, R. R. & van den Brink, M. R. Allogeneic haematopoietic stem cell transplantation: individualized stem cell and immune therapy of cancer. Nat Rev Cancer 10, 213-21.
[0241] 2. Huynh, H. et al. Insulin-like growth factor-binding protein 2 secreted by a tumorigenic cell line supports ex vivo expansion of mouse hematopoietic stem cells. Stem Cells 26, 1628-35 (2008).
[0242] 3. Zhang, C. C., Kaba, M., Iizuka, S., Huynh, H. & Lodish, H. F. Angiopoietin-like 5 and IGFBP2 stimulate ex vivo expansion of human cord blood hematopoietic stem cells as assayed by NOD/SCID transplantation. Blood 111, 3415-23 (2008).
[0243] 4. Pulte, D., Gondos, A. & Brenner, H. Trends in survival after diagnosis with hematologic malignancy in adolescence or young adulthood in the United States, 1981-2005. Cancer 115, 4973-9 (2009).
[0244] 5. Calvi, L. M. et al. Osteoblastic cells regulate the haematopoietic stem cell niche. Nature 425, 841-6 (2003).
[0245] 6. Wilson, A. & Trumpp, A. Bone-marrow haematopoietic-stem-cell niches. Nat Rev Immunol 6, 93-106 (2006).
[0246] 7. DeMambro, V. E. et al. Gender-specific changes in bone turnover and skeletal architecture in igfbp-2-null mice. Endocrinology 149, 2051-61 (2008).
[0247] 8. Song, S. W. et al. IIp45, an insulin-like growth factor binding protein 2 (IGFBP-2) binding protein, antagonizes IGFBP-2 stimulation of glioma cell invasion. Proc Natl Acad Sci USA 100, 13970-5 (2003).
[0248] 9. Russo, V. C. et al. Insulin-like growth factor binding protein-2 binding to extracellular matrix plays a critical role in neuroblastoma cell proliferation, migration, and invasion. Endocrinology 146, 4445-55 (2005).
[0249] 10. Dawczynski, K. et al. Elevated serum insulin-like growth factor binding protein-2 is associated with a high relapse risk after hematopoietic stem cell transplantation in childhood AML. Bone Marrow Transplant 37, 589-94 (2006).
[0250] 11. Dawczynski, K., Kauf, E. & Zintl, F. Changes of serum growth factors (IGF-I, -II and IGFBP-2, -3) prior to and after stem cell transplantation in children with acute leukemia. Bone Marrow Transplant 32, 411-5 (2003).
[0251] 12. Zia, F. et al. Monoclonal antibody alpha IR-3 inhibits non-small cell lung cancer growth in vitro and in vivo. J Cell Biochem Suppl 24, 269-75 (1996).
[0252] 13. Frisch, B. J., Porter, R. L. & Calvi, L. M. Hematopoietic niche and bone meet. Curr Opin Support Palliat Care 2, 211-7 (2008).
[0253] 14. Kuznetsov, S. A. et al. The interplay of osteogenesis and hematopoiesis: expression of a constitutively active PTH/PTHrP receptor in osteogenic cells perturbs the establishment of hematopoiesis in bone and of skeletal stem cells in the bone marrow. J Cell Biol 167, 1113-22 (2004).
[0254] 15. Ballen, K. K.; King, R. J.; Chitphakdithai, P.; Bolan, C. D., Jr.; Agura, E.; Hartzman, R. J.; Kennan, N. A., The national marrow donor program 20 years of unrelated donor hematopoietic cell transplantation. Biol Blood Marrow Transplant 2008, 14, (9 Suppl), 2-7.
[0255] 16. Bendall, S. C.; Stewart, M. H.; Menendez, P.; George, D.; Vijayaragavan, K.; Werbowetski-Ogilvie, T.; Ramos-Mejia, V.; Rouleau, A.; Yang, J.; Bosse, M.; Lajoie, G.; Bhatia, M., IGF and FGF cooperatively establish the regulatory stem cell niche of pluripotent human cells in vitro. Nature 2007, 448, (7157), 1015-21.
[0256] 17. Bhattacharya, D.; Rossi, D. J.; Bryder, D.; Weissman, I. L., Purified hematopoietic stem cell engraftment of rare niches corrects severe lymphoid deficiencies without host conditioning. J Exp Med 2006, 203, (1), 73-85.
[0257] 18. Clawson, T. F.; Lee, W. H.; Yoder, M. C., Differential expression of insulin-like growth factor binding proteins in murine hematopoietic stromal cell lines. Mol Cell Endocrinol 1996, 120, (1), 59-66.
[0258] 19. Czechowicz, A.; Kraft, D.; Weissman, I. L.; Bhattacharya, D., Efficient transplantation via antibody-based clearance of hematopoietic stem cell niches. Science 2007, 318, (5854), 1296-9.
[0259] 20, Delaney, C.; Heimfeld, S.; Brashem-Stein, C.; Voorhies, H.; Manger, R. L.; Bernstein, I. D., Notch-mediated expansion of human cord blood progenitor cells capable of rapid myeloid reconstitution. Nat Med 16, (2), 232-6.
[0260] 21. Eminli, S.; Foudi, A.; Stadtfeld, M.; Maherali, N.; Ahfeldt, T.; Mostoslaysky, G.; Hock, H.; Hochedlinger, K., Differentiation stage determines potential of hematopoietic cells for reprogramming into induced pluripotent stem cells. Nat Genet. 2009, 41, (9), 968-76.
[0261] 22. Forsberg, E. C.; Bhattacharya, D.; Weissman, I. L., Hematopoietic stem cells: expression profiling and beyond. Stem Cell Rev 2006, 2, (1), 23-30.
[0262] 23. Frisch, B. J.; Porter, R. L.; Gigliotti, B. J.; Olm-Shipman, A. J.; Weber, J. M.; O'Keefe, R. J.; Jordan, C. T.; Calvi, L. M., In vivo prostaglandin E2 treatment alters the bone marrow microenvironment and preferentially expands short-term hematopoietic stem cells. Blood 2009, 114, (19), 4054-63.
[0263] 24. Fu, P.; Thompson, J. A.; Bach, L. A., Promotion of cancer cell migration: an insulin-like growth factor (IGF)-independent action of IGF-binding protein-6. J Biol Chem 2007, 282, (31), 22298-306.
[0264] 25. Haug, J. S.; He, X. C.; Grindley, J. C.; Wunderlich, J. P.; Gaudenz, K.; Ross, J. T.; Paulson, A.; Wagner, K. P.; Xie, Y.; Zhu, R.; Yin, T.; Perry, J. M.; Hembree, M. J.; Redenbaugh, E. P.; Radice, G. L.; Seidel, C.; Li, L., N-cadherin expression level distinguishes reserved versus primed states of hematopoietic stem cells. Cell Stem Cell 2008, 2, (4), 367-79.
[0265] 26. Hoeflich, A.; Reisinger, R.; Lahm, H.; Kiess, W.; Blum, W. F.; Kolb, H. J.; Weber, M. M.; Wolf, E., Insulin-like growth factor-binding protein 2 in tumorigenesis: protector or promoter? Cancer Res 2001, 61, (24), 8601-10.

[0266] The foregoing is illustrative of the present invention, and is not to be construed as limiting thereof. The invention is defined by the following claims, with equivalents of the claims to be included therein.

TABLE 1
MicroCT analysis of femurs from IGFBP2^{+/+} and IGFBP2^{-/-} treated with
PBS or PEG-HBD-peptide

| | IGFBP2^{+/+} | IGFBP2^{-/-} | IGFBP2^{-/-} |
|---|---|---|---|
| | PBS | PBS | PEG-HBD |
| | N = 8 | N = 12 | N = 6 |
| Midshaft | | | |
| Cortical thickness | 0.198 ± 0.007 | 0.197 ± 0.003 | 0.200 ± 0.006 |
| Bone area | 0.889 ± 0.047 | 0.868 ± 0.018 | 0.903 ± 0.024 |
| Total area | 1.970 ± 0.062 | 1.955 ± 0.036 | 2.076 ± 0.031^{a} |
| Bone area/Total area | 0.449 ± 0.011 | 0.444 ± 0.006 | 0.435 ± 0.014 |
| Distal Femur | | | |
| Bone volume/Total | 0.143 ± 0.017 | 0.095 ± 0.007^{b} | 0.125 ± 0.012^{c} |
| volume | | | |
| Trabecular number | 4.86 ± 0.16 | 429 ± 0.09^{b} | 4.47 ± 0.15 |
| Trabecular thickness | 0.047 ± 0.003 | 0.041 ± 0.001 | 0.048 ± 0.002^{d} |
| Trabecular spacing | 0.200 ± 0.007 | 0.230 ± 0.005^{b} | 0.221 ± 0.008 |

PEG-HBD; pegylated heparin-binding domain
Values are expressed as the mean ± SEM.
^{a}p < 0.05 vs IGFBP2^{-/-} with PBS
^{b}p < 0.01 vs IGFBP2^{+/+} with PBS
^{c}p < 0.05 vs IGFBP2^{-/-} with PBS
^{d}p < 0.01 vs IGFBP2^{-/-} with PBS

TABLE 2
IGFBP-2 Heparin Binding Peptide Reduces Fat Mass

| | | Body Weight | Fat Mass |
|---|---|---|---|
| Treatment Group | Number of mice | (gms) | (gms) |
| IGFBP-2 −/− + | 8 | 30.4 ± 1.5 | 6.21 ± 0.76 |
| placebo | | | |
| IGFBP-2 −/− + | 8 | 24.9 ± 1.3 | 3.67 ± 0.36 |
| HBD | | | |
| IGFBP-2 +/+ | 8 | 25.2 ± 1.1 | 3.82 ± 0.67 |

TABLE 3
Body composition of Igfbp2^{-/-}
mice before treatment with PBS or PEG-HBD.

| | Igfbp2^{-/-} | Igfbp2^{-/-} |
|---|---|---|
| | PBS | PEG-HBD |
| Whole-body BMD | 0.0378 ± 0.0009 | 0.0382 + 0.0008 |
| Whole-body BMC/Body | 0.0115 ± 0.0004 | 0.0119 ± 0.0006 |
| weight | 10.4 ± 0.52 | 9.8 ± 0.62 |
| % body fat | | |

PEG-RBD; pegylated heparin-binding domain
BMD; bone mineral density
BMC; bone mineral content
BW; body weight

TABLE 4
Body composition of Igfbp2^{-/-}
mice after treatment with PBS or PEG-HBD.

| | Igfbp2^{-/-} | Igfbp2^{-/-} |
|---|---|---|
| | PBS | PEG-HBD |
| Whole-body BMD | 0.0445 ± 0.0006 | 0.0459 ± 0.0004 |
| Whole-body BMC/BW | 0.0138 ± 0.0004 | 0.0147 ± 0.0005 |
| % body fat | 10.4 ± 0.70 | 10.4 ± 1.02 |
| Epidydymal fat weight/BW | 12.2 ± 0.51 | 12.2 ± 0.67 |
| (mg/g) | | |

PEG-HBD; pegylated heparin-binding domain
BMD; bone mineral density
BMC; bone mineral content
BW; body weight

TABLE 5
MicroCT analysis of vertebrae (L5) from IGFBP2^{+/+}
and IGFBP2^{-/-} treated with PBS or PEG-HBD

| | IGFBP2^{+/+} | IGFBP2^{-/-} | IGFBP2^{-/-} |
|---|---|---|---|
| | PBS | PBS | PEG-HBD |
| | N = 7 | N = 9 | N = 6 |
| Bone volume/Total | 0.314 ± 0.020 | 0.278 ± 0.010 | 0.305 ± 0.012 |
| volume | | | |
| Trabecular number | 6.15 ± 0.36 | 5.77 ± 0.11 | 5.70 ± 0.10 |
| Trabecular thickness | 0.052 ± 0.002 | 0.049 ± 0.001 | 0.054 ± 0.002^{a} |
| Trabecular spacing | 0.155 ± 0.009 | 0.160 ± 0.004 | 0.161 ± 0.004 |

PEG-HBD; pegylated heparin-binding domain
Values are expressed as the mean ± SEM.
^{a}p < 0.05 vs IGFBP2^{-/-} with PBS

TABLE 6
Histomorphometric analysis of femur from IGFBP2^{-/-}
mice treated with PBS or PEG-HBD.

| | IGFBP2^{-/-} | IGFBP2^{-/-} |
|---|---|---|
| | PBS | PEG-HBD |
| | N = 5 | N = 5 |
| OS/BS (%) | 238 ± 1.11 | 3.56 ± 0.44 |
| ObS/BS (%) | 11.5 ± 1.03 | 16.26 ± 1.42^{a} |
| Nob/BPm ( /mm) | 12.31 ± 0.52 | 16.3 ± 1.4^{a} |
| ES/BS (%) | 17.11 ± 0.93 | 14.79 ± 01.58 |
| OcS/BS (%) | 11.02 ± 0.87 | 9.14 ± 0.90 |
| Noc/BPm ( /mm) | 5.19 ± 0.37 | 4.37 ± 0.39 |
| MAR (μm/day) | 0.873 ± 0.0078 | 0.91 ± 0.0453 |
| BFR/BSd (μm3/μm2/day) | 0.0796 ± 0.0164 | 0.080 ± 0.0191 |

PEG-HBD; pegylated heparin-binding domain, OS; osteoid surface, BS; bone surface, ObS; osteoblast surface, Nob; osteoblast number, BPm; bone perimeter, ES; erosion surface, OcS; osteoclast surface, Noc; osteoclast number, MAR; mineral apposition rate, BFR; bone formation rate
Values are expressed as the mean ± SEM
^{a}p< 0.05 vs IGFBP2^{-/- with PBS}

TABLE 7
KHHLGLEEPKK; HRRIGLEEPKK; RRRLGIEEPKK; KRRVGIEEPKK;
RHHLGLEEPKK; KHHVGLEEPKK; HRRLGIEEPKK; RRRVGIEEPKK;
HHHLGLEEPKK; RHHVGLEEPKK; KKHIGIEEPKK; HRRVGIEEPKK;
KKHLGLEEPKK; HHHVGLEEPKK; RHHIGIEEPKK; KHHLGVEEPKK;
RKHLGLEEPKK; KKHVGLEEPKK; HHHIGIEEPKK; RHHLGVEEPKK;
HKHLGLEEPKK; RKHVGLEEPKK; KKHIGIEEPKK; HHHLGVEEPKK;
KRHLGLEEPKK; HKHVGLEEPKK; RKHIGIEEPKK; KKHLGVEEPKK;
RRHLGLEEPKK; KRHVGLEEPKK; HKHIGIEEPKK; RKHLGVEEPKK;
HRHLGLEEPKK; RRHVGLEEPKK; KRHIGIEEPKK; HKHLGVEEPKK;
KHKLGLEEPKK; HRHVGLEEPKK; RRHIGIEEPKK; KRHLGVEEPKK;
RHKLGLEEPKK; KHKVGLEEPKK; HRHIGIEEPKK; RRHLGVEEPKK;
HHKLGLEEPKK; RHKVGLEEPKK; KHKIGIEEPKK; HRHLGVEEPKK;
KKKLGLEEPKK; HHKVGLEEPKK; RHKIGIEEPKK; KHKLGVEEPKK;
RKKLGLEEPKK; KKKVGLEEPKK; HHKIGIEEPKK; RHKLGVEEPKK;
HKKLGLEEPKK; RKKVGLEEPKK; KKKIGIEEPKK; HHKLGVEEPKK;
KRKLGLEEPKK; HKKVGLEEPKK; RKKIGIEEPKK; KKKLGVEEPKK;
RRKLGLEEPKK; KRKVGLEEPKK; HKKIGIEEPKK; RKKLGVEEPKK;
HRKLGLEEPKK; RRKVGLEEPKK; KRKIGIEEPKK; HKKLGVEEPKK;
KHRLGLEEPKK; HRKVGLEEPKK; RRKIGIEEPKK; KRKLGVEEPKK;
RHRLGLEEPKK; KHRVGLEEPKK; HRKIGIEEPKK; RRKLGVEEPKK;
HHRLGLEEPKK; RHRVGLEEPKK; KHRIGIEEPKK; HRKLGVEEPKK;
KKRLGLEEPKK; HHRVGLEEPKK; RHRIGIEEPKK; KHRLGVEEPKK;
RKRLGLEEPKK; KKRVGLEEPKK; HHRIGIEEPKK; RHRLGVEEPKK;
HKRLGLEEPKK; RKRVGLEEPKK; KKRIGIEEPKK; HHRLGVEEPKK;
KRRLGLEEPKK; HKRVGLEEPKK; RKRIGIEEPKK; KKRLGVEEPKK;
RRRLGLEEPKK; KRRVGLEEPKK; HKRIGIEEPKK; RKRLGVEEPKK;
HRRLGLEEPKK; RRRVGLEEPKK; KRRIGIEEPKK; HKRLGVEEPKK;
KHHIGLEEPKK; HRRVGLEEPKK; RRRIGIEEPKK; KRRLGVEEPKK;
RHHIGLEEPKK; KHHLGIEEPKK; HRRIGIEEPKK; RRRLGVEEPKK;
HHHIGLEEPKK; RHHLGIEEPKK; KHHVGIEEPKK; HRRLGVEEPKK;
KKHIGLEEPKK; HHHLGIEEPKK; RHHVGIEEPKK; KHHIGVEEPKK;
RKHIGLEEPKK; KKHLGIEEPKK; HHHVGIEEPKK; RHHIGVEEPKK;
HKHIGLEEPKK; RKHLGIEEPKK; KKHVGIEEPKK; HHHIGVEEPKK;
KRHIGLEEPKK; HKHLGIEEPKK; RKHVGIEEPKK; KKHIGVEEPKK;
RRHIGLEEPKK; KRHLGIEEPKK; HKHVGIEEPKK; RKHIGVEEPKK;
HRHIGLEEPKK; RRHLGIEEPKK; KRHVGIEEPKK; HKHIGVEEPKK;
KHKIGLEEPKK; HRHLGIEEPKK; RRHVGIEEPKK; KRHIGVEEPKK;
RHKIGLEEPKK; KHKLGIEEPKK; HRHVGIEEPKK; RRHIGVEEPKK;
HHKIGLEEPKK; RHKLGIEEPKK; KHKVGIEEPKK; HRHIGVEEPKK;
KKKIGLEEPKK; HHKLGIEEPKK; RHKVGIEEPKK; KHKIGVEEPKK;
RKKIGLEEPKK; KKKLGIEEPKK; HHKVGIEEPKK; RHKIGVEEPKK;
HKKIGLEEPKK; RKKLGIEEPKK; KKKVGIEEPKK; HHKIGVEEPKK;
KRKIGLEEPKK; HKKLGIEEPKK; RKKVGIEEPKK; KKKIGVEEPKK;
RRKIGLEEPKK; KRKLGIEEPKK; HKKVGIEEPKK; RKKIGVEEPKK;
HRKIGLEEPKK; RRKLGIEEPKK; KRKVGIEEPKK; HKKIGVEEPKK;
KHRIGLEEPKK; HRKLGIEEPKK; RRKVGIEEPKK; KRKIGVEEPKK;
RHRIGLEEPKK; KHRLGIEEPKK; HRKVGIEEPKK; RRKIGVEEPKK;
HHRIGLEEPKK; RHRLGIEEPKK; KHRVGIEEPKK; HRKIGVEEPKK;
KKRIGLEEPKK; HHRLGIEEPKK; RHRVGIEEPKK; KHRIGVEEPKK;
RKRIGLEEPKK; KKRLGLEEPKK; HHRVGIEEPKK; RHRIGVEEPKK;
HKRIGLEEPKK; RKRLGIEEPKK; KKRVGIEEPKK; HHRIGVEEPKK;
KRRIGLEEPKK; HKRLGIEEPKK; RKRVGIEEPKK; KKRIGVEEPKK;
RRRIGLEEPKK; KRRLGIEEPKK; HKRVGIEEPKK; RKRIGVEEPKK;
HKRIGVEEPKK; KRRLGLNEPKK; RRRVGLNEPKK; HRRIGINEPKK;
KRRIGVEEPKK; RRRLGLNEPKK; HRRVGLNEPKK; KHHVGINEPKK;
RRRIGVEEPKK; HRRLGLNEPKK; KHHLGINEPKK; RHHVGINEPKK;
HRRIGVEEPKK; KHHIGLNPKK; RHHLGINEPKK; HHHVGINEPKK;
KHHVGVEEPKK; RHHIGLNEPKK; HHHLGINEPKK; KKHVGINEPKK;
RHHVGVEEPKK; HHHIGLNEPKK; KKHLGINEPKK; RKHVGINEPKK;
HHHVGVEEPKK; KKHIGLNEPKK; RKHLGINEPKK; HKHVGINEPKK;
KKHVGVEEPKK; RKHIGLNEPKK; HKHLGINEPKK; KRHVGINEPKK;
RKHVGVEEPKK; HKHIGLNEPKK; KRHLGINEPKK; RRHVGINEPKK;
HKHVGVEEPKK; KRHIGLNEPKK; RRHLGINEPKK; HRHVGINEPKK;
KRHVGVEEPKK; RRHIGLNEPKK; HRHLGINEPKK; KHKVGINEPKK;
RRHVGVEEPKK; HRHIGLNEPKK; KHKLGINEPKK; RHKVGINEPKK;
HRHVGVEEPKK; KHKIGLNEPKK; RHKLGINEPKK; HHKVGINEPKK;
KHKVGVEEPKK; RHKIGLNEPKK; HHKLGINEPKK; KKKVGINEPKK;
RHKVGVEEPKK; HHKIGLNEPKK; KKKVGINEPKK; RKKVGINEPKK;
HHKVGVEEPKK; KKKIGLNEPKK; RKKLGINEPKK; HKKVGINEPKK;
KKKVGVEEPKK; RKKIGLNEPKK; HKKLGINEPKK; KRKVGINEPKK;
RKKVGVEEPKK; HKKIGLNEPKK; KRKLGINEPKK; RRKVGINEPKK;
HKKVGVEEPKK; KRKIGLNEPKK; RRKLGINEPKK; HRKVGINEPKK;
KRKVGVEEPKK; RRKIGLNEPKK; HRKLGINEPKK; KHRVGINEPKK;
RRKVGVEEPKK; HRKIGLNEPKK; KHRLGINEPKK; RHRVGINEPKK;
HRKVGVEEPKK; KHRIGLNEPKK; RHRLGINEPKK; HHRVGINEPKK;
KHRVGVEEPKK; RHRIGLNEPKK; HHRLGINEPKK; KKRVGINEPKK;
RHRVGVEEPKK; HHRIGLNEPKK; KKRLGINEPKK; RKRVGINEPKK;
HHRVGVEEPKK; KKRIGLNEPKK; RKRLGINEPKK; HKRVGINEPKK;
KKRVGVEEPKK; RKRIGLNEPKK; HKRLGINEPKK; KRRVGINEPKK;
RKRVGVEEPKK; HKRIGLNEPKK; KRRLGINEPKK; RRRVGINEPKK;
HKRVGVEEPKK; KRRIGLNEPKK; RRRLGINEPKK; HRRVGINEPKK;
KRRVGVEEPKK; RRRIGLNEPKK; HRRLGINEPKK; KHHLGVNEPKK;
RRRVGVEEPKK; HRRIGLNEPKK; KHHIGIENPKK; RHHLGVNEPKK;
HRRVGVEEPKK; KHHVGLNEPKK; RHHIGINEPKK; HHHLGVNEPKK;
KHHLGLNEPKK; RHHVGLNEPKK; HHHIGINEPKK; KKHLGVNEPKK;
RHHLGLNEPKK; HHHVGLNEPKK; KKHIGINEPKK; RKHLGVNEPKK;
HHHLGLNEPKK; KKHVGLNEPKK; RKHIGINEPKK; HKHLGVNEPKK;
KKHLGLNEPKK; RKHVGLNEPKK; HKHIGINEPKK; KRHLGVNEPKK;
RKHLGLNEPKK; HKHVGLNEPKK; KRHIGINEPKK; RRHLGVNEPKK;
HKHLGLNEPKK; KRHVGLNEPKK; RRHIGINEPKK; HRHLGVNEPKK;
KRHLGLNEPKK; RRHVGLNEPKK; HRHIGINEPKK; KHKLGVNEPKK;
RRHLGLNEPKK; HRHVGLNEPKK; KHKIGINEPKK; RHKLGVNEPKK;
HRHLGLNEPKK; KHKVGLNEPKK; RHKIGINEPKK; HHKLGVNEPKK;
KHKLGLNEPKK; RHKVGLNEPKK; HHKIGINEPKK; KKKLGVNEPKK;
RHKLGLNEPKK; HHKVGLNEPKK; KKKIGINEPKK; RKKLGVNEPKK;
HHKLGLNEPKK; KKKVGLNEPKK; RKKIGINEPKK; HKKLGVNEPKK;
KKKLGLNEPKK; RKKVGLNEPKK; HKKIGINEPKK; KRKLGVNEPKK;
RKKLGLNEPKK; HKKVGLNEPKK; KRKIGINEPKK; RRKLGVNEPKK;
HKKLGLNEPKK; KRKVGLNEPKK; RRKIGINEPKK; HRKLGVNEPKK;
KRKLGLNEPKK; RRKVGLNEPKK; HRKIGINEPKK; KHRLGVNEPKK;
RRKLGLNEPKK; HRKVGLNEPKK; KHRIGINEPKK; RHRLGVNEPKK;
HRKLGLNEPKK; KHRVGLNEPKK; RHRIGINEPKK; HHRLGVNEPKK;
KHRLGLNEPKK; RHRVGLNEPKK; HHRIGINEPKK; KKRLGVNEPKK;
RHRLGLNEPKK; HHRVGLNEPKK; KKRIGINEPKK; RKRLGVNEPKK;
HHRLGLNEPKK; KKRVGLNEPKK; RKRIGINEPKK; HKRLGVNEPKK;
KKRLGLNEPKK; RKRVGLNEPKK; HKRIGINEPKK; KRRLGVNEPKK;
RKRLGLNEPKK; HKRVGLNEPKK; KRRIGINEPKK; RRRLGVNEPKK;
HKRLGLNEPKK; KRRVGLNEPKK; RRRIGINEPKK; HRRLGVNEPKK;
KHHIGVNEPKK; RHHLGLENPKK; HHHVGLENPKK; KKHIGIENPKK;
RHHIGVNEPKK; HHHLGLENPKK; KKHVGLENPKK; RKHIGIENPKK;
HHHIGVNEPKK; KKHLGLENPKK; RKHVGLENPKK; HKHIGIENPKK;
KKHIGVNEPKK; RKHLGLENPKK; HKHVGLENPKK; KRHIGIENPKK;
RKHIGVNEPKK; HKHLGLENPKK; KRHVGLENPKK; RRHIGIENPKK;
HKHIGVNEPKK; KRHLGLENPKK; RRHVGLENPKK; HRHIGIENPKK;
KRHIGVNEPKK; RRHLGLENPKK; HRHVGLENPKK; KHKIGIENPKK;
RRHIGVNEPKK; HRHLGLENPKK; KHKVGLENPKK; RHKIGIENPKK;
HRHIGVNEPKK; KHKLGLENPKK; RHKVGLENPKK; HHHIGIENPKK;
KHKIGVNEPKK; RHKLGLENPKK; HHKVGLENPKK; KKKIGIENPKK;
RHKIGVNEPKK; HHKLGLENPKK; KKKVGLENPKK; RKKIGIENPKK;
HHKIGVNEPKK; KKKLGLENPKK; RKKVGLENPKK; HKKIGIENPKK;
KKKIGVNEPKK; RKKLGLENPKK; HKKVGLENPKK; KRKIGIENPKK;
RKKIGVNEPKK; HKKLGLENPKK; KRKVGLENPKK; RRKIGIENPKK;
HKKIGVNEPKK; KRKLGLENPKK; RRKVGLENPKK; HRKIGIENPKK;
KRKIGVNEPKK; RRKLGLENPKK; HRKVGLENPKK; KHRIGIENPKK;
RRKIGVNEPKK; HRKLGLENPKK; KHRVGLENPKK; RHRIGIENPKK;
HRHIGVNEPKK; KHRLGLENPKK; RHRVGLENPKK; HHRIGIENPKK;
KHRIGVNEPKK; RHRLGLENPKK; HHRVGLENPKK; KKRIGIENPKK;
RHRIGVNEPKK; HHRLGLENPKK; KKRVGLENPKK; RKRIGIENPKK;
HHRIGVNEPKK; KKRLGLENPKK; RKRVGLENPKK; HKRIGIENPKK;
KKRIGVNEPKK; RKRLGLENPKK; HKRVGLENPKK; KRRIGIENPKK;
RKRIGVNEPKK; HKRLGLENPKK; KRRVGLENPKK; RRRIGIENPKK;
HKRIGVNEPKK; KRRLGLENPKK; RRRVGLENPKK; HRRIGIENPKK;
KRRIGVNEPKK; RRRLGLENPKK; HRRVGLENPKK; KHHVGIENPKK;
RRRIGVNEPKK; HRRLGLENPKK; KHHLGIENPKK; RHHVGIENPKK;
HRRIGVNEPKK; KHHIGLENPKK; RHHLGIENPKK; HHHVGIENPKK;
KHHVGVNEPKK; RHHIGLENPKK; HHHLGIENPKK; KKHVGLENPKK;
RHHVGVNEPKK; HHHIGLENPKK; KKHLGIENPKK; RKHVGIENPKK;
HHHVGVNEPKK; KKHIGLENPKK; RKHLGIENPKK; HKHVGIENPKK;
KKHVGVNEPKK; RKHIGLENPKK; HKHLGIENPKK; KRHVGIENPKK;
RKHVGVNEPKK; HKHIGLENPKK; KRHLGIENPKK; RRHVGIENPKK;
HKHVGVNEPKK; KRHIGLENPKK; RRHLGIENPKK; HRHVGIENPKK;
KRHVGVNEPKK; RRHIGLENPKK; HRHLGIENPKK; KHKVGIENPKK;
RRHVGVNEPKK; HRHIGLENPKK; KHKLGIENPKK; RHKVGIENPKK;
HRHVGVNEPKK; KHKIGLENPKK; RHKLGIENPKK; HHKVGIENPKK;
KHKVGVNEPKK; RHKIGLENPKK; HHKLGIENPKK; KKKVGIENPKK;
RHKVGVNEPKK; HHKIGLENPKK; KKKLGIENPKK; RKKVGIENPKK;
HHKVGVNEPKK; KKKIGLENPKK; RKKLGIENPKK; HKKVGIENPKK;
KKKVGVNEPKK; RKKIGLENPKK; HKKLGIENPKK; KRKVGIENPKK;
RKKVGVNEPKK; HKKIGLENPKK; KRKLGIENPKK; RRKVGIENPKK;
HKKVGVNEPKK; KRKIGLENPKK; RRKLGIENPKK; HRKVGIENPKK;
KRKVGVNEPKK; RRKIGLENPKK; HRKLGIENPKK; KHRVGIENPKK;
RRKVGVNEPKK; HRKIGLENPKK; KHRLGIENPKK; RHRVGIENPKK;
HRKVGVNEPKK; KHRIGLENPKK; RHRLGIENPKK; HHRVGIENPKK;
KHRVGVNEPKK; RHRIGLENPKK; HHRLGIENPKK; KKRVGIENPKK;
RHRVGVNEPKK; HHRIGLENPKK; KKRLGIENPKK; RKRVGIENPKK;
HHRVGVNEPKK; KKRIGLENPKK; RKRLGIENPKK; HKRVGIENPKK;
KKRVGVNEPKK; RKRIGLENPKK; HKRLGIENPKK; KRRVGIENPKK;
RKRVGVNEPKK; HKRIGLENPKK; KRRLGIENPKK; RRRVGIENPKK;
HKRVGVNEPKK; KRRIGLENPKK; RRRLGIENPKK; HRRVGIENPKK;
KRRVGVNEPKK; RRRIGLENPKK; HRRLGIENPKK; KHHLGVENPKK;
RRRVGVNEPKK; HRRIGLENPKK; KHHIGIENPKK; RHHLGVENPKK;
HRRVGVNEPKK; KHHVGLENPKK; RHHIGIENPKK; HHHLGVENPKK;
KHHLGLENPKK; RHHVGLENPKK; HHHIGIENPKK; KKHLGVENPKK;
RKHLGVENPKK; HKHVGVENPKK; KRHIGLNNPKK; RRHLGINNPKK;
HKHLGVENPKK; KRHVGVENPKK; RRHIGLNNPKK; HRHLGINNPKK;
KRHLGVENPKK; RRHVGVENPKK; HRHIGLNNPKK; KHKLGINNPKK;
RRHLGVENPKK; HRHVGVENPKK; KHKIGLNNPKK; RHKLGINNPKK;
HRHLGVENPKK; KHKVGVENPKK; RHKIGLNNPKK; HHKLGINNPKK;
KHKLGVENPKK; RHKVGVENPKK; HHKIGLNNPKK; KKKLGINNPKK;
RHKLGVENPKK; HHKVGVENPKK; KKKIGLNNPKK; RKKLGINNPKK;
HHKLGVENPKK; KKKVGVENPKK; RKKIGLNNPKK; HKKLGINNPKK;
KKKLGVENPKK; RKKVGVENPKK; HKKIGLNNPKK; KRKLGINNPKK;
RKKLGVENPKK; HKKVGVENPKK; KRKIGLNNPKK; RRKLGINNPKK;
HKKLGVENPKK; KRKVGVENPKK; RRKIGLNNPKK; HRKLGINNPKK;
KRKLGVENPKK; RRKVGVEEPKK; HRKIGLNNPKK; KHKLGINNPKK;
RRKLGVENPKK; HRKVGVENPKK; KHRIGLNNPKK; RHRLGINNPKK;
HRKLGVENPKK; KHRVGVENPKK; RHRIGLNNPKK; HHRLGINNPKK;
KHRLGVENPKK; RHRVGVENPKK; HHRIGLNNPKK; KKRLGINNPKK;
RHRLGVENPKK; HHRVGVENPKK; KKRIGLNNPKK; RKRLGINNPKK;
HHRLGVENPKK; KKRVGVENPKK; RKRIGLNNPKK; HKRLGINNPKK;
KKRLGVENPKK; RKRVGVENPKK; HKRIGLNNPKK; KRRLGINNPKK;
RKRLGVENPKK; HKRVGVENPKK; KRRIGLNNPKK; RRRLGINNPKK;
HKRLGVENPKK; KRRVGVENPKK; RRRIGLNNPKK; HRRLGINNPKK;
KRRLGVENPKK; RRRVGVENPKK; HRRIGLNNPKK; KHHIGIENPKK;
RRRLGVENPKK; HRRVGVENPKK; KHHVGLNNPKK; RHHIGINNPKK;
HRRLGVENPKK; KHHLGLNNPKK; RHHVGLNNPKK; HHHIGINNPKK;
KHHIGVENPKK; RHHLGLNNPKK; HHHVGLNNPKK; KKHIGINNPKK;
RHHIGVEEPKK; HHHLGLNNPKK; KKHVGLNNPKK; RKHIGINNPKK;
HHHIGVENPKK; KKHLGLNNPKK; RKHVGLNNPKK; HKHIGINNPKK;
KKHIGVENPKK; RKHLGLNNPKK; HKHVGLNNPKK; KRHIGINNPKK;
RKHIGVENPKK; HKHLGLNNPKK; KRHVGLNNPKK; RRHLGINNPKK;
HKHIGVENPKK; KRHLGLNNPKK; RRHVGLNNPKK; HRHIGINNPKK;
KRHIGVENPKK; RRHLGLNNPKK; HRHVGLNNPKK; KHKIGINNPKK;
RRHIGVENPKK; HRHLGLNNPKK; KHKVGLNNPKK; RHKIGINNPKK;
HRHIGVENPKK; KHKLGLNNPKK; RHKVGLNNPKK; HHKIGINNPKK;
KHKIGVENPKK; RHKLGLNNPKK; HHKVGLNNPKK; KKKIGINNPKK;
RHKIGVENPKK; HHKLGLNNPKK; KKKVGLNNPKK; RKKIGINNPKK;
HHKIGVENPKK; KKKLGLNNPKK; RKKVGLNNPKK; HKKIGINNPKK;
KKKIGVENPKK; RKKLGLNNPKK; HKKVGLNNPKK; KRKIGINNPKK;
RKKIGVENPKK; HKKLGLNNPKK; KRKVGLNNPKK; RRKIGINNPKK;
HKKIGVENPKK; KRKLGLNNPKK; RRKVGLNNPKK; HRKIGINNPKK;
KRKIGVENPKK; RRKLGLNNPKK; HRKVGLNNPKK; KHRIGINNPKK;
RRKIGVENPKK; HRKLGLNNPKK; KHRVGLNNPKK; RHRIGINNPKK;
HRKIGVENPKK; KHRLGLNNPKK; RHRVGLNNPKK; HHRIGINNPKK;
KHRIGVENPKK; RHRLGLNNPKK; HHRVGLNNPKK; KKRIGINNPKK;
RHRIGVENPKK; HHRLGLNNPKK; KKRVGLNNPKK; RKRIGINNPKK;
HHRIGVENPKK; KKRLGLNNPKK; RKRVGLNNPKK; HKRIGINNPKK;
KKRIGVENPKK; RKRLGLNNPKK; HKRVGLNNPKK; KRRIGINNPKK;
RKRIGVENPKK; HKRLGLNNPKK; KRRVGLNNPKK; RRRIGINNPKK;
HKRIGVENPKK; KRRLGLNNPKK; RRRVGLNNPKK; HRRIGINNPKK;
KRRIGVENPKK; RRRLGLNNPKK; HRRVGLNNPKK; KHHLGINNPKK;
RRRIGVENPKK; HRRLGLNNPKK; KHHLGINNPKK; RHHVGINNPKK;
HRRIGVENPKK; KHHIGLNNPKK; RHHLGINNPKK; HHHVGINNPKK;
KHHVGVENPKK; RHHIGLNNPKK; HHHLGINNPKK; KKHVGINNPKK;
RHHVGVENPKK; HHHIGLNNPKK; KKHLGINNPKK; RKHVGINNPKK;
HHHVGVENPKK; KKHIGLNNPKK; RKHLGINNPKK; HKHVGINNPKK;
KKHVGVENPKK; RKHIGLNNPKK; HKHLGINNPKK; KRHVGINNPKK;
RKHVGVENPKK; HKHIGLNNPKK; KRHLGINNPKK; RRHVGINNPKK;
HRHVGINNPKK; KHKIGVNNPKK; RHKLGLEEPKR; HHKVGLEEPKR;
KHKVGINNPKK; RHKIGVNNPKK; HHKLGLEEPKR; KKKVGLEEPKR;
RHKVGINNPKK; HHKIGVNNPKK; KKKLGLEEPKR; RKKVGLEEPKR;
HHKVGINNPKK; KKKIGVNNPKK; RKKLGLEEPKR; HKKVGLEEPKR;
KKKVGINNPKK; RKKIGVNNPKK; HKKLGLEEPKR; KRKVGLEEPKR;
RKKVGINNPKK; HKKIGVNNPKK; KRKLGLEEPKR; RRKVGLEEPKR;
HKKVGINNPKK; KRKIGVNNPKK; RRKLGLEEPKR; HRKVGLEEPKR;
KRKVGINNPKK; RRKIGVNNPKK; HRKLGLEEPKR; KHRVGLEEPKR;
RRKVGINNPKK; HRKIGVNNPKK; KHRLGLEEPKR; RHRVGLEEPKR;
HRKVGINNPKK; KHRIGVNNPKK; RHRLGLEEPKR; HHRVGLEEPKR;
KHRVGINNPKK; RHRIGVNNPKK; HHRLGLEEPKR; KKRVGLEEPKR;
RHRVGINNPKK; HHRIGVNNPKK; KKRLGLEEPKR; RKRVGLEEPKR;
HHRVGINNPKK; KKRIGVNNPKK; RKRLGLEEPKR; HKRVGLEEPKR;
KKRVGINNPKK; RKRIGVNNPKK; HKRLGLEEPKR; KRRVGLEEPKR;
RKRVGINNPKK; HKRIGVNNPKK; KRRLGLEEPKR; RRRVGLEEPKR;
HKRVGINNPKK; KRRIGVNNPKK; RRRLGLEEPKR; HRRVGLEEPKR;
KRRVGINNPKK; RRRIGVNNPKK; HRRLGLEEPKR; KHHLGIEEPKR;
RRRVGINNPKK; HRRIGVNNPKK; KHHIGLEEPKR; RHHLGIEEPKR;
HRRVGINNPKK; KHHVGVNNPKK; RHHIGLEEPKR; HHHLGIEEPKR;
KHHLGVNNPKK; RHHVGVNNPKK; HHHIGLEEPKR; KKHLGIEEPKR;
RHHLGVNNPKK; HHHVGVNNPKK; KKHIGLEEPKR; RKHLGIEEPKR;
HHHLGVNNPKK; KKHVGVNNPKK; RKHIGLEEPKR; HKHLGIEEPKR;
KKHLGVNNPKK; RKHVGVNNPKK; HKHIGLEEPKR; KRHLGIEEPKR;
RKHLGVNNPKK; HKHVGVNNPKK; KRHIGLEEPKR; RRHLGIEEPKR;
HKHLGVNNPKK; KRHVGVNNPKK; RRHIGLEEPKR; HRHLGIEEPKR;
KRHLGVNNPKK; RRHVGVNNPKK; HRHIGLEEPKR; KHKLGIEEPKR;
RRHLGVNNPKK; HRHVGVNNPKK; KHKIGLEEPKR; RHKLGIEEPKR;
HRHLGVNNPKK; KHKVGVNNPKK; RHKIGLEEPKR; HHKLGIEEPKR;
KHKLGVNNPKK; RHKVGVNNPKK; HHKIGLEEPKR; KKKLGIEEPKR;
RHKLGVNNPKK; HHKVGVNNPKK; KKKIGLEEPKR; RKKLGIEEPKR;
HHKLGVNNPKK; KKKVGVNNPKK; RKKIGLEEPKR; HKKLGIEEPKR;
KKKLGVNNPKK; RKKVGVNNPKK; HKKIGLEEPKR; KRKLGIEEPKR;
RKKLGVNNPKK; HKKVGVNNPKK; KRKIGLEEPKR; RRKLGIEEPKR;
HKKLGVNNPKK; KRKVGVNNPKK; RRKIGLEEPKR; HRKLGIEEPKR;
KRKLGVNNPKK; RRKVGVNNPKK; HRKIGLEEPKR; KHRLGIEEPKR;
RRKLGVNNPKK; HRKVGVNNPKK; KHRIGLEEPKR; RHRLGLEEPKR;
HRKLGVNNPKK; KHRVGVNNPKK; RHRIGLEEPKR; HHRLGIEEPKR;
KHRLGVNNPKK; RHRVGVNNPKK; HHRIGLEEPKR; KKRLGIEEPKR;
RHRLGVNNPKK; HHRVGVNNPKK; KKRIGLEEPKR; RKRLGIEEPKR;
HHRLGVNNPKK; KKRVGVNNPKK; RKRIGLEEPKR; HKRLGIEEPKR;
KKRLGVNNPKK; RKRVGVNNPKK; HKRIGLEEPKR; KRRLGIEEPKR;
RKRLGVNNPKK; HKRVGVNNPKK; KRRIGLEEPKR; RRRLGIEEPKR;
HKRLGVNNPKK; KRRVGVNNPKK; RRRIGLEEPKR; HRRLGIEEPKR;
KRRLGVNNPKK; RRRVGVNNPKK; HRRIGLEEPKR; KHHIGIEEPKR;
RRRLGVNNPKK; HRRVGVNNPKK; KHHVGLEEPKR; RHHIGIEEPKR;
HRRLGVNNPKK; KHHLGLEEPKR; RHHVGLEEPKR; HHHIGIEEPKR;
KHHIGVNNPKK; RHHLGLEEPKR; HHHVGLEEPKR; KKHIGIEEPKR;
RHHIGVNNPKK; HHHLGLEEPKR; KKHVGLEEPKR; RKHIGIEEPKR;
HHHIGVNNPKK; KKHLGLEEPKR; RKHVGLEEPKR; HKHIGIEEPKR;
KKHIGVNNPKK; RKHLGLEEPKR; HKHVGLEEPKR; KRHIGIEEPKR;
RKHIGVNNPKK; HKHLGLEEPKR; KRHVGLEEPKR; RRHIGIEEPKR;
HKHIGVNNPKK; KRHLGLEEPKR; RRKVGLEEPKR; HRHIGIEEPKR;
KRHIGVNNPKK; RRHLGLEEPKR; HRHVGLEEPKR; KHKIGIEEPKR;
RRHIGVNNPKK; HRHLGLEEPKR; KHKVGLEEPKR; RHKIGIEEPKR;
HRHIGVNNPKK; KHKLGLEEPKR; RHKVGLEEPKR; HHKIGIEEPKR;
KKKIGIEEPKR; RKKLGVEEPKR; HKKVGVEEPKR; KRKIGLNEPKR;
RKKIGIEEPKR; HKKLGVEEPKR; KRKVGVEEPKR; RRKIGLNEPKR;
HKKIGIEEPKR; KRKLGVEEPKR; RRKVGVEEPKR; HRKIGLNEPKR;
KRKIGIEEPKR; RRKLGVEEPKR; HRKVGVEEPKR; KHRIGLNEPKR;
RRKIGIEEPKR; HRKLGVEEPKR; KHRVGVEEPKR; RHRIGLNEPKR;
HRKIGIEEPKR; KHRLGVEEPKR; RHRVGVEEPKR; HHRIGLNEPKR;
KHRIGIEEPKR; RHRLGVEEPKR; HHRVGVEEPKR; KKRIGLNEPKR;
RHRIGIEEPKR; HHRLGVEEPKR; KKRVGVEEPKR; RKRIGLNEPKR;
HHRIGIEEPKR; KKRLGVEEPKR; RKRVGVEEPKR; HKRIGLNEPKR;
KKRIGIEEPKR; RKRLGVEEPKR; HKRVGVEEPKR; KRRIGLNEPKR;
RKRIGIEEPKR; HKRLGVEEPKR; KRRVGVEEPKR; RRRIGLNEPKR;
HKRIGIEEPKR; KRRLGVEEPKR; RRRVGVEEPKR; HRRIGLNEPKR;
KRRIGIEEPKR; RRRLGVEEPKR; HRRVGVEEPKR; KHHVGLNEPKR;
RRRIGIEEPKR; HRRLGVEEPKR; KHHLGLNEPKR; RHHVGLNEPKR;
HRRIGIEEPKR; KHHIGVEEPKR; RHHLGLNEPKR; HHHVGLNEPKR;
KHHVGIEEPKR; RHHIGVEEPKR; HHHLGLNEPKR; KKHVGLNEPKR;
RHHVGIEEPKR; HHHIGVEEPKR; KKHLGLNEPKR; RKHVGLNEPKR;
HHHVGIEEPKR; KKHIGVEEPKR; RKHLGLNEPKR; HKHVGLNEPKR;
KKHVGIEEPKR; RRHIGVEEPKR; HKHLGLNEPKR; KRHVGLNEPKR;
RKHVGIEEPKR; HKHIGVEEPKR; KRHLGLNEPKR; RRHVGLNEPKR;
HKHVGIEEPKR; KRHIGVEEPKR; RRHLGLNEPKR; HRHVGLNEPKR;
KRHVGIEEPKR; RRHIGVEEPKR; HRHLGLNEPKR; KHKVGLNEPKR;
RRHVGIEEPKR; HRHIGVEEPKR; KHKLGLNEPKR; RHKVGLNEPKR;
HRHVGIEEPKR; KHKIGVEEPKR; RHKLGLNEPKR; HHKVGLNEPKR;
KHKVGIEEPKR; RHKIGVEEPKR; HHKLGLNEPKR; KKKVGLNEPKR;
RHKVGIEEPKR; HHKIGVEEPKR; KKKLGLNEPKR; RKKVGLNEPKR;
HHKVGIEEPKR; KKKIGVEEPKR; RKKLGLNEPKR; HKKVGLNEPKR;
KKKVGIEEPKR; RKKIGVEEPKR; HKKLGLNEPKR; KRKVGLNEPKR;
RKKVGIEEPKR; HKKIGVEEPKR; KRKLGLNEPKR; RRKVGLNEPKR;
HKKVGIEEPKR; KRKIGVEEPKR; RRKLGLNEPKR; HRKVGLNEPKR;
KRKVGIEEPKR; RRKIGVEEPKR; HRKLGLNEPKR; KHRVGLNEPKR;
RRKVGIEEPKR; HRKIGVEEPKR; KHRLGLNEPKR; RHRVGLNEPKR;
HRKVGIEEPKR; KHRIGVEEPKR; RHRLGLNEPKR; HHRVGLNEPKR;
KHRVGIEEPKR; RHRIGVEEPKR; HHRLGLNEPKR; KKRVGLNEPKR;
RHRVGIEEPKR; HHRIGVEEPKR; KKRLGLNEPKR; RKRVGLNEPKR;
HHRVGIEEPKR; KKRIGVEEPKR; RKRLGLNEPKR; HKRVGLNEPKR;
KKRVGIEEPKR; RKRIGVEEPKR; HKRLGLNEPKR; KRRVGLNEPKR;
RKRVGIEEPKR; HKRIGVEEPKR; KRRLGLNEPKR; RRRVGLNEPKR;
HKRVGIEEPKR; KRRIGVEEPKR; RRRLGLNEPKR; HRRVGLNEPKR;
KRRVGIEEPKR; RRRIGVEEPKR; HRRLGLNEPKR; KHHLGINEPKR;
RRRVGIEEPKR; HRRIGVEEPKR; KHHIGLNPKR; RHHLGINEPKR;
HRRVGIEEPKR; KHHVGVEEPKR; RHHIGLNEPKR; HHHLGINEPKR;
KHHLGVEEPKR; RHHVGVEEPKR; HHHIGLNEPKR; KKHLGINEPKR;
RHHLGVEEPKR; HHHVGVEEPKR; KKHIGLNEPKR; RKHLGINEPKR;
HHHLGVEEPKR; KKHVGVEEPKR; RKHIGLNEPKR; HKHLGINEPKR;
KKHLGVEEPKR; RKHVGVEEPKR; HKHIGLNEPKR; KRHLGINEPKR;
RKHLGVEEPKR; HKHVGVEEPKR; KRHIGLNEPKR; RRHLGINEPKR;
HKHLGVEEPKR; KRHVGVEEPKR; RRHIGLNEPKR; HRHLGINEPKR;
KRHLGVEEPKR; RRHVGVEEPKR; HRHIGLNEPKR; KHKLGINEPKR;
RRHLGVEEPKR; HRHVGVEEPKR; KHKIGLNEPKR; RHKLGINEPKR;
HRHLGVEEPKR; KHKVGVEEPKR; RHKIGLNEPKR; HHKLGINEPKR;
KHKLGVEEPKR; RHKVGVEEPKR; HHKIGLNEPKR; KKKLGINEPKR;
RHKLGVEEPKR; HHKVGVEEPKR; KKKIGLNEPKR; RKKLGINEPKR;
HHKLGVEEPKR; KKKVGVEEPKR; RKKIGLNEPKR; HKKLGINEPKR;
KKKLGVEEPKR; RKKLGVEEPKR; HKKIGLNEPKR; KRKLGINEPKR;
RRKLGINEPKR; HRKVGINEPKR; KHRIGVNEPKR; RHRLGLENPKR;
HRKLGINEPKR; KHRVGINEPKR; RHRIGVNEPKR; HHRLGLENPKR;
KHRLGINEPKR; RHRVGINEPKR; HHRIGVNEPKR; KKRLGLENPKR;
RHRLGINEPKR; HHRVGINEPKR; KKRIGVNEPKR; RKRLGLENPKR;
HHRLGINEPKR; KKRVGINEPKR; RKRIGVNEPKR; HKRLGLENPKR;
KKRLGINEPKR; RKRVGINEPKR; HKRIGVNEPKR; KRRLGLENPKR;
RKRLGINEPKR; HKRVGINEPKR; KRRIGVNEPKR; RRRLGLENPKR;
HKRLGINEPKR; KRRVGINEPKR; RRRIGVNEPKR; HRRLGLENPKR;
KRRLGINEPKR; RRRVGINEPKR; HRRIGVNEPKR; KHHIGLENPKR;
RRRLGINEPKR; HRRVGINEPKR; KHHVGVNEPKR; RHHIGLENPKR;
HRRLGINEPKR; KHHLGVNEPKR; RHHVGVNEPKR; HHHIGLENPKR;
KHHIGIENPKR; RHHLGVNEPKR; HHHVGVNEPKR; KKHIGLENPKR;
RHHIGINEPKR; HHHLGVNEPKR; KKHVGVNEPKR; RKHIGLENPKR;
HHHIGINEPKR; KKHLGVNEPKR; RKHVGVNEPKR; HKHIGLENPKR;
KKHIGINEPKR; RKHLGVNEPKR; HKHVGVNEPKR; KRHIGLENPKR;
RKHIGINEPKR; HKHLGVNEPKR; KRHVGVNEPKR; RRHIGLENPKR;
HKHIGINEPKR; KRHLGVNEPKR; RRHVGVNEPKR; HRHIGLENPKR;
KRHIGINEPKR; RRHLGVNEPKR; HRHVGVNEPKR; KHKIGLENPKR;
RRHIGINEPKR; HRHLGVNEPKR; KHKVGVNEPKR; RHKIGLENPKR;
HRHIGINEPKR; KHKLGVNEPKR; RHKVGVNEPKR; HHKIGLENPKR;
KHKIGINEPKR; RHKLGVNEPKR; HHKVGVNEPKR; KKKIGLENPKR;
RHKIGINEPKR; HHHLGVNEPKR; KKKVGVNEPKR; RKKIGLENPKR;
HHKIGINEPKR; KKKLGVNEPKR; RKKVGVNEPKR; HKKIGLENPKR;
KKKIGINEPKR; RKKLGVNEPKR; HKKVGVNEPKR; KRKIGLENPKR;
RKKIGINEPKR; HKKLGVNEPKR; KRKVGVNEPKR; RRKIGLENPKR;
HKKIGINEPKR; KRKLGVNEPKR; RRKVGVNEPKR; HRKIGLENPKR;
KRKIGINEPKR; RRKLGVNEPKR; HRKVGVNEPKR; KHRIGLENPKR;
RRKIGINEPKR; HRKLGVNEPKR; KHRVGVNEPKR; RHRIGLENPKR;
HRKIGINEPKR; KHRLGVNEPKR; RHRVGVNEPKR; HHRIGLENPKR;
KHRIGINEPKR; RHRLGVNEPKR; HHRVGVNEPKR; KKRIGLENPKR;
RHRIGINEPKR; HHRLGVNEPKR; KKRVGVNEPKR; RKRIGLENPKR;
HHRIGINEPKR; KKRLGVNEPKR; RKRVGVNEPKR; HKRIGLENPKR;
KKRIGINEPKR; RKRLGVNEPKR; HKRVGVNEPKR; KRRIGLENPKR;
RKRIGINEPKR; HKRLGVNEPKR; KRRVGVNEPKR; RRRIGLENPKR;
HKRIGINEPKR; KRRLGVNEPKR; RRRVGVNEPKR; HRRIGLENPKR;
KRRIGINEPKR; RRRLGVNEPKR; HRRVGVNEPKR; KHHVGLENPKR;
RRRIGINEPKR; HRRLGVNEPKR; KHHLGLENPKR; RHHVGLENPKR;
HRRIGINEPKR; KHHIGVNEPKR; RHHLGLENPKR; HHHVGLENPKR;
KHHVGINEPKR; RHHIGVNEPKR; HHHLGLENPKR; KKHVGLENPKR;
RHHVGINEPKR; HHHIGVNEPKR; KKHLGLENPKR; RKHVGLENPKR;
HHHVGINEPKR; KKHIGVNEPKR; RKHLGLENPKR; HKHVGLENPKR;
KKHVGINEPKR; RKHIGVNEPKR; HKHLGLENPKR; KRHVGLENPKR;
RKHVGINEPKR; HKHIGVNEPKR; KRHLGLENPKR; RRHVGLENPKR;
HKHVGINEPKR; KRHIGVNEPKR; RRHLGLENPKR; HRHVGLENPKR;
KRHVGINEPKR; RRHIGVNEPKR; HRHLGLENPKR; KHKVGLENPKR;
RRHVGINEPKR; HRHIGVNEPKR; KHKLGLENPKR; RHKVGLENPKR;
HRHVGINEPKR; KHKIGVNEPKR; RHKLGLENPKR; HHKVGLENPKR;
KHKVGINEPKR; RHKIGVNEPKR; HHKLGLENPKR; KKKVGLENPKR;
RHKVGINEPKR; HHKLGVNEPKR; KKKLGLENPKR; RKKVGLENPKR;
HHKVGINEPKR; KKKIGVNEPKR; RKKLGLENPKR; HKKVGLENPKR;
KKKVGINEPKR; RKKIGVNEPKR; HKKLGLENPKR; KRKVGLENPKR;
RKKVGINEPKR; HKKIGVNEPKR; KRKLGLENPKR; RRKVGLENPKR;
HKKVGINEPKR; KRKIGVNEPKR; RRKLGLENPKR; HRKVGLENPKR;
KRKVGINEPKR; RRKIGVNEPKR; HRKLGLENPKR; KHRVGLENPKR;
RRKVGINEPKR; HRKIGVNEPKR; KHRLGLENPKR; RHRVGLENPKR;
HHRVGLENPKR; KKRIGIENPKR; RKRLGVENPKR; HKRVGVENPKR;
KKRVGLENPKR; RKRIGIENPKR; HKRLGVENPKR; KRRVGVENPKR;
RKRVGLENPKR; HKRIGIENPKR; KRRLGVENPKR; RRRVGVENPKR;
HKRVGLENPKR; KRRIGIENPKR; RRRLGVENPKR; HRRVGVENPKR;
KRRVGLENPKR; RRRIGIENPKR; HRRLGVENPKR; KHHLGLNNPKR;
RRRVGLENPKR; HRRIGIENPKR; KHHIGVENPKR; RHHLGLNNPKR;
HRRVGLENPKR; KHHVGIENPKR; RHHIGVEEPKR; HHHLGLNNPKR;
KHHLGIENPKR; RHHVGIENPKR; HHHIGVENPKR; KKHLGLNNPKR;
RHHLGIENPKR; HHHVGIENPKR; KKHIGVENPKR; RKHLGLNNPKR;
HHHLGIENPKR; KKHVGIENPKR; RKHIGVENPKR; HKHLGLNNPKR;
KKHLGIENPKR; RKHVGIENPKR; HKHIGVENPKR; KRHLGLNNPKR;
RKHLGIENPKR; HKHVGIENPKR; KRHIGVENPKR; RRHLGLNNPKR;
HKHLGIENPKR; KRHVGIENPKR; RRHIGVENPKR; HRHLGLNNPKR;
KRHLGIENPKR; RRHVGIENPKR; HRHIGVENPKR; KHKLGLNNPKR;
RRHLGIENPKR; HRHVGIENPKR; KHKIGVENPKR; RHKLGLNNPKR;
HRHLGIENPKR; KHKVGIENPKR; RHKIGVENPKR; HHKLGLNNPKR;
KHKLGIENPKR; RHKVGIENPKR; HHKIGVENPKR; KKKLGLNNPKR;
RHKLGIENPKR; HHKVGIENPKR; KKKIGVENPKR; RKKLGLNNPKR;
HHKLGIENPKR; KKKVGIENPKR; RKKIGVENPKR; HKKLGLNNPKR;
KKKLGIENPKR; RKKVGIENPKR; HKKIGVENPKR; KRKLGLNNPKR;
RKKLGIENPKR; HKKVGIENPKR; KRKIGVENPKR; RRKLGLNNPKR;
HKKLGIENPKR; KRKVGIENPKR; RRKIGVENPKR; HRKLGLNNPKR;
KRKLGIENPKR; RRKVGIENPKR; HRKIGVENPKR; KHRLGLNNPKR;
RRKLGIENPKR; HRKVGIENPKR; KHRIGVENPKR; RHRLGLNNPKR;
HRKLGIENPKR; KHRVGIENPKR; RHRIGVENPKR; HHRLGLNNPKR;
KHRLGIENPKR; RHRVGIENPKR; HHRIGVENPKR; KKRLGLNNPKR;
RHRLGIENPKR; HHRVGIENPKR; KKRIGVENPKR; RKRLGLNNPKR;
HHRLGIENPKR; KKRVGIENPKR; RKRIGVENPKR; HKRLGLNNPKR;
KKRLGIENPKR; RKRVGIENPKR; HKRIGVENPKR; KRRLGLNNPKR;
RKRLGIENPKR; HKRVGIENPKR; KRRIGVENPKR; RRRLGLNNPKR;
HKRLGIENPKR; KRRVGIENPKR; RRRIGVENPKR; HRRLGLNNPKR;
KRRLGIENPKR; RRRVGIENPKR; HRRIGVENPKR; KHHIGLNNPKR;
RRRLGIENPKR; HRRVGIENPKR; KHHVGVENPKR; RHHIGLNNPKR;
HRRLGIENPKR; KHHLGVENPKR; RHHVGVENPKR; HHHIGLNNPKR;
KHHIGIENPKR; RHHLGVENPKR; HHHVGVENPKR; KKHIGLNNPKR;
RHHIGIENPKR; HHHLGVENPKR; KKHVGVENPKR; RKHIGLNNPKR;
HHHIGIENPKR; KKHLGVENPKR; RKHVGVENPKR; HKHIGLNNPKR;
KKHIGIENPKR; RKHLGVENPKR; HKHVGVENPKR; KRHIGLNNPKR;
RKHIGIENPKR; HKHLGVENPKR; KRHVGVENPKR; RRHIGLNNPKR;
HKHIGIENPKR; KRHLGVENPKR; RRHVGVENPKR; HRHIGLNNPKR;
KRHIGIENPKR; RRHLGVENPKR; HRHVGVENPKR; KHKIGLNNPKR;
RRHIGIENPKR; HRHLGVENPKR; KHKVGVENPKR; RHKIGLNNPKR;
HRHIGIENPKR; KHKLGVENPKR; RHKVGVENPKR; HHKIGLNNPKR;
KHKIGIENPKR; RHKLGVENPKR; HHKVGVENPKR; KKKIGLNNPKR;
RHKIGIENPKR; HHKLGVENPKR; KKKVGVENPKR; RKKIGLNNPKR;
HHKIGIENPKR; KKKLGVENPKR; RKKVGVENPKR; HKKIGLNNPKR;
KKKIGIENPKR; RKKLGVENPKR; HKKVGVENPKR; KRKIGLNNPKR;
RKKIGIENPKR; HKKLGVENPKR; KRKVGVENPKR; RRKIGLNNPKR;
HKKIGIENPKR; KRKLGVENPKR; RRKVGVEEPKR; HRKIGLNNPKR;
KRKIGIENPKR; RRKLGVENPKR; HRKVGVENPKR; KHRIGLNNPKR;
RRKIGIENPKR; HRKLGVENPKR; KHRVGVENPKR; RHRIGLNNPKR;
HRKIGIENPKR; KHRLGVENPKR; RHRVGVENPKR; HHRIGLNNPKR;
KHRIGIENPKR; RHRLGVENPKR; HHRVGVENPKR; KKRIGLNNPKR;
RHRIGIENPKR; HHRLGVENPKR; KKRVGVENPKR; RKRIGLNNPKR;
HHRIGIENPKR; KKRLGVENPKR; RKRVGVENPKR; HKRIGLNNPKR;
KRRIGLNNPKR; RRRLGINNPKR; HRRVGINNPKR; KHHVGVNNPKR;
RRRIGLNNPKR; HRRLGINNPKR; KHHLGVNNPKR; RHHVGVNNPKR;
HRRIGLNNPKR; KHHIGIENPKR; RHHLGVNNPKR; HHHVGVNNPKR;
KHHVGLNNPKR; RHHIGINNPKR; HHHLGVNNPKR; KKHVGVNNPKR;
RHHVGLNNPKR; HHHIGINNPKR; KKHLGVNNPKR; RKHVGVNNPKR;
HHHVGLNNPKR; KKHIGINNPKR; RKHLGVNNPKR; HKHVGVNNPKR;
KKHVGLNNPKR; RKHIGINNPKR; HKHLGVNNPKR; KRHVGVNNPKR;
RKHVGLNNPKR; HKHIGINNPKR; KRHLGVNNPKR; RRHVGVNNPKR;
HKHVGLNNPKR; KRHIGINNPKR; RRHLGVNNPKR; HRHVGVNNPKR;
KRHVGLNNPKR; RRHIGINNPKR; HRHLGVNNPKR; KHKVGVNNPKR;
RRHVGLNNPKR; HRHIGINNPKR; KHKLGVNNPKR; RHKVGVNNPKR;
HRHVGLNNPKR; KHKIGINNPKR; RHKLGVNNPKR; HHKVGVNNPKR;
KHKVGLNNPKR; RHKIGINNPKR; HHKLGVNNPKR; KKKVGVNNPKR;
RHKVGLNNPKR; HHKIGINNPKR; KKKLGVNNPKR; RKKVGVNNPKR;
HHKVGLNNPKR; KKKIGINNPKR; RKKLGVNNPKR; HKKVGVNNPKR;
KKKVGLNNPKR; RKKIGINNPKR; HKKLGVNNPKR; KRKVGVNNPKR;
RKKVGLNNPKR; HKKIGINNPKR; KRKLGVNNPKR; RRKVGVNNPKR;
HKKVGLNNPKR; KRKIGINNPKR; RRKLGVNNPKR; HRKVGVNNPKR;
KRKVGLNNPKR; RRKIGINNPKR; HRKLGVNNPKR; KHRVGVNNPKR;
RRKVGLNNPKR; HRKIGINNPKR; KHRLGVNNPKR; RHRVGVNNPKR;
HRKVGLNNPKR; KHKIGINNPKR; RHRLGVNNPKR; HHRVGVNNPKR;
KHRVGLNNPKR; RHRIGINNPKR; HHRLGVNNPKR; KKRVGVNNPKR;
RHRVGLNNPKR; HHRIGINNPKR; KKRLGVNNPKR; RKRVGVNNPKR;
HHRVGLNNPKR; KKRIGINNPKR; RKRLGVNNPKR; HKRVGVNNPKR;
KKRVGLNNPKR; RKRIGINNPKR; HKRLGVNNPKR; KRRVGVNNPKR;
RKRVGLNNPKR; HKRIGINNPKR; KRRLGVNNPKR; RRRVGVNNPKR;
HKRVGLNNPKR; KRRIGINNPKR; RRRLGVNNPKR; HRRVGVNNPKR;
KRRVGLNNPKR; RRRIGINNPKR; HRRLGVNNPKR; KHHLGLEEPKH;
RRRVGLNNPKR; HRRIGINNPKR; KHHIGVNNPKR; RHHLGLEEPKH;
HRRVGLNNPKR; KHHVGINNPKR; RHHIGVNNPKR; HHHLGLEEPKH;
KHHLGINNPKR; RHHVGINNPKR; HHHIGVNNPKR; KKHLGLEEPKH;
RHHLGINNPKR; HHHVGINNPKR; KKHIGVNNPKR; RKHLGLEEPKH;
HHHLGINNPKR; KKHVGINNPKR; RKHIGVNNPKR; HKHLGLEEPKH;
KKHLGINNPKR; RKHVGINNPKR; HKHIGVNNPKR; KRHLGLEEPKH;
RKHLGINNPKR; HKHVGINNPKR; KRHIGVNNPKR; RRHLGLEEPKH;
HKHLGINNPKR; KRHVGVNNPKR; RRHIGVNNPKR; HRHLGLEEPKH;
KRHLGINNPKR; RRHVGINNPKR; HRHIGVNNPKR; KHKLGLEEPKH;
RRHLGINNPKR; HRHVGINNPKR; KHKIGVNNPKR; RHKLGLEEPKH;
HRHLGINNPKR; KHKVGINNPKR; RHKIGVNNPKR; HHKLGLEEPKH;
KHKLGINNPKR; RHKVGVNNPKR; HHKIGVNNPKR; KKKLGLEEPKH;
RHKLGINNPKR; HKKVGINNPKR; KKKIGVNNPKR; RKKLGLEEPKH;
HHKLGINNPKR; KKKVGINNPKR; RKKIGVNNPKR; HKKLGLEEPKH;
KKKLGINNPKR; RKKVGINNPKR; HKKIGVNNPKR; KRKLGLEEPKH;
RKKLGINNPKR; HKKVGINNPKR; KRKIGVNNPKR; RRKLGLEEPKH;
HKKLGINNPKR; KRKVGINNPKR; RRKIGVNNPKR; HRKLGLEEPKH;
KRKLGINNPKR; RRKVGINNPKR; HRKIGVNNPKR; KHRLGLEEPKH;
RRKLGINNPKR; HRKVGINNPKR; KHRIGVNNPKR; RHRLGLEEPKH;
HRKLGINNPKR; KHRVGINNPKR; RHRIGVNNPKR; HHRLGLEEPKH;
KHRLGINNPKR; RHRVGINNPKR; HHRIGVNNPKR; KKRLGLEEPKH;
RHRLGINNPKR; HHRVGINNPKR; KKRIGVNNPKR; RKRLGLEEPKH;
HHRLGINNPKR; KKRVGINNPKR; RKRIGVNNPKR; HKRLGLEEPKH;
KKRLGINNPKR; RKRVGINNPKR; HKRIGVNNPKR; KRRLGLEEPKH;
RKRLGINNPKR; HKRVGINNPKR; KRRIGVNNPKR; RRRLGLEEPKH;
HKRLGINNPKR; KRRVGINNPKR; RRRIGVNNPKR; HRRLGLEEPKH;
KRRLGINNPKR; RRRVGINNPKR; HRRIGVNNPKR; KHHIGLEEPKH;
RHHIGLEEPKH; HHHLGIEEPKH; KKHVGIEEPKH; RKHIGVEEPKH;
HHHIGLEEPKH; KKHLGIEEPKH; RKHVGIEEPKH; HKHIGVEEPKH;
KKHIGLEEPKH; RKHLGIEEPKH; HKHVGIEEPKH; KRHIGVEEPKH;
RKHIGLEEPKH; HKHLGIEEPKH; KRHVGIEEPKH; RRHIGVEEPKH;
HKHIGLEEPKH; KRHLGIEEPKH; RRHVGIEEPKH; HRHIGVEEPKH;
KRHIGLEEPKH; RRKLGIEEPKH; HRHVGIEEPKH; KHKIGVEEPKH;
RRHIGLEEPKH; HRHLGIEEPKH; KHKVGIEEPKH; RHKIGVEEPKH;
HRHIGLEEPKH; KHKLGIEEPKH; RHKVGIEEPKH; HHKIGVEEPKH;
KHKIGLEEPKH; RHKLGIEEPKH; HHKVGIEEPKH; KKKIGVEEPKH;
RHKIGLEEPKH; HHKLGIEEPKH; KKKVGIEEPKH; RKKIGVEEPKH;
HHKIGLEEPKH; KKKLGIEEPKH; RKKVGIEEPKH; HKKIGVEEPKH;
KKKIGLEEPKH; RKKLGIEEPKH; HKKVGIEEPKH; KRKIGVEEPKH;
RKKIGLEEPKH; HKKLGIEEPKH; KRKVGIEEPKH; RRKIGVEEPKH;
HKKIGLEEPKH; KRKLGIEEPKH; RRKVGIEEPKH; HRKIGVEEPKH;
KRKIGLEEPKH; RRKLGIEEPKH; HRKVGIEEPKH; KHRIGVEEPKH;
RRKIGLEEPKH; HRKLGIEEPKH; KHRVGIEEPKH; RHRIGVEEPKH;
HRKIGLEEPKH; KHRLGIEEPKH; RHRVGIEEPKH; HHRIGVEEPKH;
KHRIGLEEPKH; RHRLGIEEPKH; HHRVGIEEPKH; KKRIGVEEPKH;
RHRIGLEEPKH; HHRLGIEEPKH; KKRVGIEEPKH; RKRIGVEEPKH;
HHRIGLEEPKH; KKRLGIEEPKH; RKRVGIEEPKH; HKRIGVEEPKH;
KKRIGLEEPKH; RKRLGIEEPKH; HKRVGIEEPKH; KRRIGVEEPKH;
RKRIGLEEPKH; HKRLGIEEPKH; KRRVGIEEPKH; RRRIGVEEPKH;
HKRIGLEEPKH; KRRLGIEEPKH; RRRVGIEEPKH; HRRIGVEEPKH;
KRRIGLEEPKH; RRRLGIEEPKH; HRRVGIEEPKH; KHHVGVEEPKH;
RRRIGLEEPKH; HRRLGIEEPKH; KHHLGVEEPKH; RHHVGVEEPKH;
HRRIGLEEPKH; KHHIGIEEPKH; RHHLGVEEPKH; HHHVGVEEPKH;
KHHVGLEEPKH; RHHIGIEEPKH; HHHLGVEEPKH; KKHVGVEEPKH;
RHHVGLEEPKH; HHHIGIEEPKH; KKHLGVEEPKH; RKHVGVEEPKH;
HHHVGLEEPKH; KKHIGIEEPKH; RKHLGVEEPKH; HKHVGVEEPKH;
KKHVGLEEPKH; RKHIGIEEPKH; HKHLGVEEPKH; KRHVGVEEPKH;
RKHVGLEEPKH; HKHIGIEEPKH; KRHLGVEEPKH; RRHVGVEEPKH;
HKHVGLEEPKH; KRHIGIEEPKH; RRHLGVEEPKH; HRHVGVEEPKH;
KRHVGLEEPKH; RRHIGIEEPKH; HRHLGVEEPKH; KHKVGVEEPKH;
RRHVGLEEPKH; HRHIGIEEPKH; KHKLGVEEPKH; RHKVGVEEPKH;
HRHVGLEEPKH; KHKIGIEEPKH; RHKLGVEEPKH; HHKVGVEEPKH;
KHKVGLEEPKH; RHKIGIEEPKH; HHKLGVEEPKH; KKKVGVEEPKH;
RHKVGLEEPKH; HHKIGIEEPKH; KKKLGVEEPKH; RKKVGVEEPKH;
HHKVGLEEPKH; KKKIGIEEPKH; RKKLGVEEPKH; HKKVGVEEPKH;
KKKVGLEEPKH; RKKIGIEEPKH; HKKLGVEEPKH; KRKVGVEEPKH;
RKKVGLEEPKH; HKKIGIEEPKH; KRKLGVEEPKH; RRKVGVEEPKH;
HKKVGLEEPKH; KRKIGIEEPKH; RRKLGVEEPKH; HRKVGVEEPKH;
KRKVGLEEPKH; RRKIGVEEPKH; HRKLGVEEPKH; KHRVGVEEPKH;
RRKVGLEEPKH; HRKIGIEEPKH; KHRLGVEEPKH; RHRVGVEEPKH;
HRKVGLEEPKH; KHRIGIEEPKH; RHRLGVEEPKH; HHRVGVEEPKH;
KHRVGLEEPKH; RHRIGIEEPKH; HHRLGVEEPKH; KKRVGVEEPKH;
RHRVGLEEPKH; HHRIGIEEPKH; KKRLGVEEPKH; RKRVGVEEPKH;
HHRVGLEEPKH; KKRIGIEEPKH; RKRLGVEEPKH; HKRVGVEEPKH;
KKRVGLEEPKH; RKRIGIEEPKH; HKRLGVEEPKH; KRRVGVEEPKH;
RKRVGLEEPKH; HKRIGIEEPKH; KRRLGVEEPKH; RRRVGVEEPKH;
HKRVGLEEPKH; KRRIGIEEPKH; RRRLGVEEPKH; HRRVGVEEPKH;
KRRVGLEEPKH; RRRIGIEEPKH; HRRLGVEEPKH; KHHLGLNEPKH;
RRRVGLEEPKH; HRRIGIEEPKH; KHHIGVEEPKH; RHHLGLNEPKH;
HRRVGLEEPKH; KHHVGIEEPKH; RHHIGVEEPKH; HHHLGLNEPKH;
KHHLGIEEPKH; RHHVGIEEPKH; HHHIGVEEPKH; KKHLGLNEPKH;
RHHLGIEEPKH; HHHVGIEEPKH; KKHIGVEEPKH; RKHLGLNEPKH;
HKHLGLNEPKH; KRHVGLNEPKH; RRHIGINEPKH; HRHLGVNEPKH;
KRHLGLNEPKH; RRHVGLNEPKH; HRHIGINEPKH; KHKLGVNEPKH;
RRHLGLNEPKH; HRHVGLNEPKH; KHKIGINEPKH; RHKLGVNEPKH;
HRHLGLNEPKH; KHKVGLNEPKH; RHKIGINEPKH; HHKLGVNEPKH;
KHKLGLNEPKH; RHKVGLNEPKH; HHKIGINEPKH; KKKLGVNEPKH;
RHKLGLNEPKH; HHKVGLNEPKH; KKKIGINEPKH; RKKLGVNEPKH;
HHKLGLNEPKH; KKKVGLNEPKH; RKKIGINEPKH; HKKLGVNEPKH;
KKKLGLNEPKH; RKKVGLNEPKH; HKKIGINEPKH; KRKLGVNEPKH;
RKKLGLNEPKH; HKKVGLNEPKH; KRKIGINEPKH; RRKLGVNEPKH;
HKKLGLNEPKH; KRKVGLNEPKH; RRKIGINEPKH; HRKLGVNEPKH;
KRKLGLNEPKH; RRKVGLNEPKH; HRKIGINEPKH; KHRLGVNEPKH;
RRKLGLNEPKH; HRKVGLNEPKH; KHRIGINEPKH; RHRLGVNEPKH;
HRKLGLNEPKH; KHRVGLNEPKH; RHRIGINEPKH; HHRLGVNEPKH;
KHRLGLNEPKH; RHRVGLNEPKH; HHRIGINEPKH; KKRLGVNEPKH;
RHRLGLNEPKH; HHRVGLNEPKH; KKRIGINEPKH; RKRLGVNEPKH;
HHRLGLNEPKH; KKRVGLNEPKH; RKRIGINEPKH; HKRLGVNEPKH;
KKRLGLNEPKH; RKRVGLNEPKH; HKRIGINEPKH; KRRLGVNEPKH;
RKRLGLNEPKH; HKRVGLNEPKH; KRRIGINEPKH; RRRLGVNEPKH;
HKRLGLNEPKH; KRRVGLNEPKH; RRRIGINEPKH; HRRLGVNEPKH;
KRRLGLNEPKH; RRRVGLNEPKH; HRRIGINEPKH; KHHIGVNEPKH;
RRRLGLNEPKH; HRRVGLNEPKH; KHHVGINEPKH; RHHIGVNEPKH;
HRRLGLNEPKH; KHHLGINEPKH; RHHVGINEPKH; HHHIGVNEPKH;
KHHIGLNPKH; RHHLGINEPKH; HHHVGINEPKH; KKHIGVNEPKH;
RHHIGLNEPKH; HHHLGINEPKH; KKHVGINEPKH; RKHIGVNEPKH;
HHHIGLNEPKH; KKHLGINEPKH; RKHVGINEPKH; HKHIGVNEPKH;
KKHIGLNEPKH; RKHLGINEPKH; HKHVGINEPKH; KRHIGVNEPKH;
RKHIGLNEPKH; HKHLGINEPKH; KRHVGINEPKH; RRHIGVNEPKH;
HKHIGLNEPKH; KRHLGINEPKH; RRHVGINEPKH; HRHIGVNEPKH;
KRHIGLNEPKH; RRHLGINEPKH; HRHVGINEPKH; KHKIGVNEPKH;
RRHIGLNEPKH; HRHLGINEPKH; KHKVGINEPKH; RHKIGVNEPKH;
HRHIGLNEPKH; KHKLGINEPKH; RHKVGINEPKH; HHKIGVNEPKH;
KHKIGLNEPKH; RHKLGINEPKH; HHKVGINEPKH; KKKIGVNEPKH;
RHKIGLNEPKH; HHKLGINEPKH; KKKVGINEPKH; RKKIGVNEPKH;
HHKIGLNEPKH; KKKLGINEPKH; RKKVGINEPKH; HKKIGVNEPKH;
KKKIGLNEPKH; RKKLGINEPKH; HKKVGINEPKH; KRKIGVNEPKH;
RKKIGLNEPKH; HKKLGINEPKH; KRKVGINEPKH; RRKIGVNEPKH;
HKKIGLNEPKH; KRKLGINEPKH; RRKVGINEPKH; HRKIGVNEPKH;
KRKIGLNEPKH; RRKLGINEPKH; HRKVGINEPKH; KHRIGVNEPKH;
RRKIGLNEPKH; HRKLGINEPKH; KHRVGINEPKH; RHRIGVNEPKH;
HRKIGLNEPKH; KHRLGINEPKH; RHRVGINEPKH; HHRIGVNEPKH;
KHRIGLNEPKH; RHRLGINEPKH; HHRVGINEPKH; KKRIGVNEPKH;
RHRIGLNEPKH; HHRLGINEPKH; KKRVGINEPKH; RKRIGVNEPKH;
HHRIGLNEPKH; KKRLGINEPKH; RKRVGINEPKH; HKRIGVNEPKH;
KKRIGLNEPKH; RKRLGINEPKH; HKRVGINEPKH; KRRIGVNEPKH;
RKRIGLNEPKH; HKRLGINEPKH; KRRVGINEPKH; RRRIGVNEPKH;
HKRIGLNEPKH; KRRLGINEPKH; RRRVGINEPKH; HRRIGVNEPKH;
KRRIGLNEPKH; RRRLGINEPKH; HRRVGINEPKH; KHHVGVNEPKH;
RRRIGLNEPKH; HRRLGINEPKH; KHHLGVNEPKH; RHHVGVNEPKH;
HRRIGLNEPKH; KHHIGIENPKH; RHHLGVNEPKH; HHHVGVNEPKH;
KHHVGLNEPKH; RHHIGINEPKH; HHHLGVNEPKH; KKHVGVNEPKH;
RHHVGLNEPKH; HHHIGINEPKH; KKHLGVNEPKH; RKHVGVNEPKH;
HHHVGLNEPKH; KKHIGINEPKH; RKHLGVNEPKH; HKHVGVNEPKH;
KKHVGLNEPKH; RKHIGINEPKH; HKHLGVNEPKH; KRHVGVNEPKH;
RKHVGLNEPKH; HKHIGINEPKH; KRHLGVNEPKH; RRHVGVNEPKH;
HKHVGLNEPKH; KRHIGINEPKH; RRHLGVNEPKH; HRHVGVNEPKH;
KHKVGVNEPKH; RHKIGLENPKH; HHKLGIENPKH; KKKVGIENPKH;
RHKVGVNEPKH; HHKIGLENPKH; KKKLGIENPKH; RKKVGIENPKH;
HHKVGVNEPKH; KKKIGLENPKH; RKKLGIENPKH; HKKVGIENPKH;
KKKVGVNEPKH; RKKIGLENPKH; HKKLGIENPKH; KRKVGIENPKH;
RKKVGVNEPKH; HKKIGLENPKH; KRKLGIENPKH; RRKVGIENPKH;
HKKVGVNEPKH; KRKIGLENPKH; RRKLGIENPKH; HRKVGIENPKH;
KRKVGVNEPKH; RRKIGLENPKH; HRKLGIENPKH; KHRVGIENPKH;
RRKVGVNEPKH; HRKIGLENPKH; KHRLGIENPKH; RHRVGIENPKH;
HRKVGVNEPKH; KHRIGLENPKH; RHRLGIENPKH; HHRVGIENPKH;
KHRVGVNEPKH; RHRIGLENPKH; HHRLGIENPKH; KKRVGIENPKH;
RHRVGVNEPKH; HHRIGLENPKH; KKRLGIENPKH; RKRVGIENPKH;
HHRVGVNEPKH; KKRIGLENPKH; RKRLGIENPKH; HKRVGIENPKH;
KKRVGVNEPKH; RKRIGLENPKH; HKRLGIENPKH; KRRVGIENPKH;
RKRVGVNEPKH; HKRIGLENPKH; KRRLGIENPKH; RRRVGIENPKH;
HKRVGVNEPKH; KRRIGLENPKH; RRRLGIENPKH; HRRVGIENPKH;
KRRVGVNEPKH; RRRIGLENPKH; HRRLGIENPKH; KHHLGVENPKH;
RRRVGVNEPKH; HRRIGLENPKH; KHHIGIENPKH; RHHLGVENPKH;
HRRVGVNEPKH; KHHVGLENPKH; RHHIGIENPKH; HHHLGVENPKH;
KHHLGLENPKH; RHHVGLENPKH; HHHIGIENPKH; KKHLGVENPKH;
RHHLGLENPKH; HHHVGLENPKH; KKHIGIENPKH; RKHLGVENPKH;
HHHLGLENPKH; KKHVGLENPKH; RKHIGIENPKH; HKHLGVENPKH;
KKHLGLENPKH; RKHVGLENPKH; HKHIGIENPKH; KRHLGVENPKH;
RKHLGLENPKH; HKHVGLENPKH; KRHIGIENPKH; RRHLGVENPKH;
HKHLGLENPKH; KRHVGLENPKH; RRHIGIENPKH; HRHLGVENPKH;
KRHLGLENPKH; RRHVGLENPKH; HRHIGIENPKH; KHKLGVENPKH;
RRHLGLENPKH; HRHVGLENPKH; KHKIGIENPKH; RHKLGVENPKH;
HRHLGLENPKH; KHKVGLENPKH; RHKIGIENPKH; HHKLGVENPKH;
KHKLGLENPKH; RHKVGLENPKH; HHKIGIENPKH; KKKLGVENPKH;
RHKLGLENPKH; HHKVGLENPKH; KKKIGIENPKH; RKKLGVENPKH;
HHKLGLENPKH; KKKVGLENPKH; RKKIGIENPKH; HKKLGVENPKH;
KKKLGLENPKH; RKKLGLENPKH; HKKIGIENPKH; KRKLGVENPKH;
RKKLGLENPKH; HKKVGLENPKH; KRKIGIENPKH; RRKLGVENPKH;
HKKLGLENPKH; KRKVGLENPKH; RRKIGIENPKH; HRKLGVENPKH;
KRKLGLENPKH; RRKVGLENPKH; HRKIGIENPKH; KHRLGVENPKH;
RRKLGLENPKH; HRKVGLENPKH; KHRIGIENPKH; RHRLGVENPKH;
HRKLGLENPKH; KHRVGLENPKH; RHRIGIENPKH; HHRLGVENPKH;
KHRLGLENPKH; RHRVGLENPKH; HHRIGIENPKH; KKRLGVENPKH;
RHRLGLENPKH; HHRVGLENPKH; KKRIGIENPKH; RKRLGVENPKH;
HHRLGLENPKH; KKRVGLENPKH; RKRIGIENPKH; HKRLGVENPKH;
KKRLGLENPKH; RKRVGLENPKH; HKRIGIENPKH; KRRLGVENPKH;
RKRLGLENPKH; HKRVGLENPKH; KRRIGIENPKH; RRRLGVENPKH;
HKRLGLENPKH; KRRVGLENPKH; RRRIGIENPKH; HRRLGVENPKH;
KRRLGLENPKH; RRRVGLENPKH; HRRIGIENPKH; KHHIGVENPKH;
RRRLGLENPKH; HRRVGLENPKH; KHHVGIENPKH; RHHIGVEEPKH;
HRRLGLENPKH; KHHLGIENPKH; RHHVGIENPKH; HHHIGVENPKH;
KHHIGLENPKH; RHHLGIENPKH; HHHVGIENPKH; KKHIGVENPKH;
RHHIGLENPKH; HHHLGIENPKH; KKHVGIENPKH; RKHIGVENPKH;
HHHIGLENPKH; KKHLGIENPKH; RKHVGIENPKH; HKHIGVENPKH;
KKHIGLENPKH; RKHLGIENPKH; HKHVGIENPKH; KRHIGVENPKH;
RKHIGLENPKH; HKHLGIENPKH; KRHVGIENPKH; RRHIGVENPKH;
HKHIGLENPKH; KRHLGIENPKH; RRHVGIENPKH; HRHIGVENPKH;
KRHIGLENPKH; RRHLGIENPKH; HRHVGIENPKH; KHKIGVENPKH;
RRHIGLENPKH; HRHLGIENPKH; KHKVGIENPKH; RHKIGVENPKH;
HRHIGLENPKH; KHKLGIENPKH; RHKVGIENPKH; HHKIGVENPKH;
KHKIGLENPKH; RHKLGIENPKH; HHKVGIENPKH; KKKIGVENPKH;
RKKIGVENPKH; HKKLGLNNPKH; KRKVGLNNPKH; RRKIGINNPKH;
HKKIGVENPKH; KRKLGLNNPKH; RRKVGLNNPKH; HRKIGINNPKH;
KRKIGVENPKH; RRKLGLNNPKH; HRKVGLNNPKH; KHRIGINNPKH;
RRKIGVENPKH; HRKLGLNNPKH; KHRVGLNNPKH; RHRIGINNPKH;
HRKIGVENPKH; KHRLGLNNPKH; RHRVGLNNPKH; HHRIGINNPKH;
KHRIGVENPKH; RHRLGLNNPKH; HHRVGLNNPKH; KKRIGINNPKH;
RHRIGVENPKH; HHRLGLNNPKH; KKRVGLNNPKH; RKRIGINNPKH;
HHRIGVENPKH; KKRLGLNNPKH; RKRVGLNNPKH; HKRIGINNPKH;
KKRIGVENPKH; RKRLGLNNPKH; HKRVGLNNPKH; KRRIGINNPKH;
RKRIGVENPKH; HKRLGLNNPKH; KRRVGLNNPKH; RRRIGINNPKH;
HKRIGVENPKH; KRRLGLNNPKH; RRRVGLNNPKH; HRRIGINNPKH;
KRRIGVENPKH; RRRLGLNNPKH; HRRVGLNNPKH; KHHVGINNPKH;
RRRIGVENPKH; HRRLGLNNPKH; KHHLGINNPKH; RHHVGINNPKH;
HRRIGVENPKH; KHHIGLNNPKH; RHHLGINNPKH; HHHVGINNPKH;
KHHVGVENPKH; RHHIGLNNPKH; HHHLGINNPKH; KKHVGINNPKH;
RHHVGVENPKH; HHHIGLNNPKH; KKHLGINNPKH; RKHVGINNPKH;
HHHVGVENPKH; KKHIGLNNPKH; RKHLGINNPKH; HKHVGINNPKH;
KKHVGVENPKH; RKHIGLNNPKH; HKHLGINNPKH; KRHVGINNPKH;
RKHVGVENPKH; HKHIGLNNPKH; KRHLGINNPKH; RRHVGINNPKH;
HKHVGVENPKH; KRHIGLNNPKH; RRHLGINNPKH; HRHVGINNPKH;
KRHVGVENPKH; RRHIGLNNPKH; HRHLGINNPKH; KHKVGINNPKH;
RRHVGVENPKH; HRHIGLNNPKH; KHKLGINNPKH; RHKVGINNPKH;
HRHVGVENPKH; KHKIGLNNPKH; RHKLGINNPKH; HHKVGINNPKH;
KHKVGVENPKH; RHKIGLNNPKH; HHKLGINNPKH; KKKVGINNPKH;
RHKVGVENPKH; HHKIGLNNPKH; KKKLGINNPKH; RKKVGINNPKH;
HHKVGVENPKH; KKKIGLNNPKH; RKKLGINNPKH; HKKVGINNPKH;
KKKVGVENPKH; RKKIGLNNPKH; HKKLGINNPKH; KRKVGINNPKH;
RKKVGVENPKH; HKKIGLNNPKH; KRKLGINNPKH; RRKVGINNPKH;
HKKVGVENPKH; KRKIGLNNPKH; RRKLGINNPKH; HRKVGINNPKH;
KRKVGVENPKH; RRKIGLNNPKH; HRKLGINNPKH; KHRVGINNPKH;
RRKVGVEEPKH; HRKIGLNNPKH; KHRLGINNPKH; RHRVGINNPKH;
HRKVGVENPKH; KHRIGLNNPKH; RHRLGINNPKH; HHRVGINNPKH;
KHRVGVENPKH; RHRIGLNNPKH; HHRLGINNPKH; KKRVGINNPKH;
RHRVGVENPKH; HHRIGLNNPKH; KKRLGINNPKH; RKRVGINNPKH;
HHRVGVENPKH; KKRIGLNNPKH; RKRLGINNPKH; HKRVGINNPKH;
KKRVGVENPKH; RKRIGLNNPKH; HKRLGINNPKH; KRRVGINNPKH;
RKRVGVENPKH; HKRIGLNNPKH; KRRLGINNPKH; RRRVGINNPKH;
HKRVGVENPKH; KRRIGLNNPKH; RRRLGINNPKH; HRRVGINNPKH;
KRRVGVENPKH; RRRIGLNNPKH; HRRLGINNPKH; KHHLGVNNPKH;
RRRVGVENPKH; HRRIGLNNPKH; KHHIGIENPKH; RHHLGVNNPKH;
HRRVGVENPKH; KHHVGLNNPKH; RHHIGINNPKH; HHHLGVNNPKH;
KHHLGLNNPKH; RHHVGLNNPKH; HHHIGINNPKH; KKHLGVNNPKH;
RHHLGLNNPKH; HHHVGLNNPKH; KKHIGINNPKH; RKHLGVNNPKH;
HHHLGLNNPKH; KKHVGLNNPKH; RKHIGINNPKH; HKHLGVNNPKH;
KKHLGLNNPKH; RKHVGLNNPKH; HKHIGINNPKH; KRHLGVNNPKH;
RKHLGLNNPKH; HKHVGLNNPKH; KRHIGINNPKH; RRHLGVNNPKH;
HKHLGLNNPKH; KRHVGLNNPKH; RRHIGINNPKH; HRHLGVNNPKH;
KRHLGLNNPKH; RRHVGLNNPKH; HRHIGINNPKH; KHKLGVNNPKH;
RRHLGLNNPKH; HRHVGLNNPKH; KHKIGINNPKH; RHKLGVNNPKH;
HRHLGLNNPKH; KHKVGLNNPKH; RHKIGINNPKH; HHKLGVNNPKH;
KHKLGLNNPKH; RHKVGLNNPKH; HHKIGINNPKH; KKKLGVNNPKH;
RHKLGLNNPKH; HHKVGLNNPKH; KKKIGINNPKH; RKKLGVNNPKH;
HHKLGLNNPKH; KKKVGLNNPKH; RKKIGINNPKH; HKKLGVNNPKH;
KKKLGLNNPKH; RKKVGLNNPKH; HKKIGINNPKH; KRKLGVNNPKH;
RKKLGLNNPKH; HKKVGLNNPKH; KRKIGINNPKH; RRKLGVNNPKH;
HRKLGVNNPKH; KHRVGVNNPKH; RHRIGLEEPRK; HHRLGIEEPRK;
KHRLGVNNPKH; RHRVGVNNPKH; HHRIGLEEPRK; KKRLGIEEPRK;
RHRLGVNNPKH; HHRVGVNNPKH; KKRIGLEEPRK; RKRLGIEEPRK;
HHRLGVNNPKH; KKRVGVNNPKH; RKRIGLEEPRK; HKRLGIEEPRK;
KKRLGVNNPKH; RKRVGVNNPKH; HKRIGLEEPRK; KRRLGIEEPRK;
RKRLGVNNPKH; HKRVGVNNPKH; KRRIGLEEPRK; RRRLGIEEPRK;
HKRLGVNNPKH; KRRVGVNNPKH; RRRIGLEEPRK; HRRLGIEEPRK;
KRRLGVNNPKH; RRRVGVNNPKH; HRRIGLEEPRK; KHHIGIEEPRK;
RRRLGVNNPKH; HRRVGVNNPKH; KHHVGLEEPRK; RHHIGIEEPRK;
HRRLGVNNPKH; KHHLGLEEPRK; RHHVGLEEPRK; HHHIGIEEPRK;
KHHIGVNNPKH; RHHLGLEEPRK; HHHVGLEEPRK; KKHIGIEEPRK;
RHHIGVNNPKH; HHHLGLEEPRK; KKHVGLEEPRK; RKHIGIEEPRK;
HHHIGVNNPKH; KKHLGLEEPRK; RKHVGLEEPRK; HKHIGIEEPRK;
KKHIGVNNPKH; RKHLGLEEPRK; HKHVGLEEPRK; KRHIGIEEPRK;
RKHIGVNNPKH; HKHLGLEEPRK; KRHVGLEEPRK; RRHIGIEEPRK;
HKHIGVNNPKH; KRHLGLEEPRK; RRHVGLEEPRK; HRHIGIEEPRK;
KRHIGVNNPKH; RRHLGLEEPRK; HRHVGLEEPRK; KHKIGIEEPRK;
RRHIGVNNPKH; HRHLGLEEPRK; KHKVGLEEPRK; RHKIGIEEPRK;
HRHIGVNNPKH; KHKLGLEEPRK; RHKVGLEEPRK; HHKIGIEEPRK;
KHKIGVNNPKH; RHKLGLEEPRK; HHKVGLEEPRK; KKKIGIEEPRK;
RHKIGVNNPKH; HHKLGLEEPRK; KKKVGLEEPRK; RKKIGIEEPRK;
HHKIGVNNPKH; KKKLGLEEPRK; RKKVGLEEPRK; HKKIGIEEPRK;
KKKIGVNNPKH; RKKLGLEEPRK; HKKVGLEEPRK; KRKIGIEEPRK;
RKKIGVNNPKH; HKKLGLEEPRK; KRKVGLEEPRK; RRKIGIEEPRK;
HKKIGVNNPKH; KRKLGLEEPRK; RRKVGLEEPRK; HRKIGIEEPRK;
KRKIGVNNPKH; RRKLGLEEPRK; HRKVGLEEPRK; KHRIGIEEPRK;
RRKIGVNNPKH; HRKLGLEEPRK; KHRVGLEEPRK; RHRIGIEEPRK;
HRKIGVNNPKH; KHRLGLEEPRK; RHRVGLEEPRK; HHRIGIEEPRK;
KHRIGVNNPKH; RHRLGLEEPRK; HHRVGLEEPRK; KKRIGIEEPRK;
RHRIGVNNPKH; HHRLGLEEPRK; KKRVGLEEPRK; RKRIGIEEPRK;
HHRIGVNNPKH; KKRLGLEEPRK; RKRVGLEEPRK; HKRIGIEEPRK;
KKRIGVNNPKH; RKRLGLEEPRK; HKRVGLEEPRK; KRRIGIEEPRK;
RKRIGVNNPKH; HKRLGLEEPRK; KRRVGLEEPRK; RRRIGIEEPRK;
HKRIGVNNPKH; KRRLGLEEPRK; RRRVGLEEPRK; HRRIGIEEPRK;
KRRIGVNNPKH; RRRLGLEEPRK; HRRVGLEEPRK; KHHVGIEEPRK;
RRRIGVNNPKH; HRRLGLEEPRK; KHHLGIEEPRK; RHHVGIEEPRK;
HRRIGVNNPKH; KHHIGLEEPRK; RHHLGIEEPRK; HHHVGIEEPRK;
KHHVGVNNPKH; RHHIGLEEPRK; HHHLGIEEPRK; KKHVGIEEPRK;
RHHVGVNNPKH; HHHIGLEEPRK; KKHLGIEEPRK; RKHVGIEEPRK;
HHHVGVNNPKH; KKHIGLEEPRK; RKHLGIEEPRK; HKHVGIEEPRK;
KKHVGVNNPKH; RKHIGLEEPRK; HKHLGIEEPRK; KRHVGIEEPRK;
RKHVGVNNPKH; HKHIGLEEPRK; KRHLGIEEPRK; RRHVGIEEPRK;
HKHVGVNNPKH; KRHIGLEEPRK; RRHLGIEEPRK; HRHVGIEEPRK;
KRHVGVNNPKH; RRHIGLEEPRK; HRHLGIEEPRK; KHKVGIEEPRK;
RRHVGVNNPKH; HRHIGLEEPRK; KHKLGIEEPRK; RHKVGIEEPRK;
HRHVGVNNPKH; KHKIGLEEPRK; RHKLGIEEPRK; HHKVGIEEPRK;
KHKVGVNNPKH; RHKIGLEEPRK; HHKLGIEEPRK; KKKVGIEEPRK;
RHKVGVNNPKH; HHKIGLEEPRK; KKKLGIEEPRK; RKKVGIEEPRK;
HHKVGVNNPKH; KKKIGLEEPRK; RKKLGIEEPRK; HKKVGIEEPRK;
KKKVGVNNPKH; RKKIGLEEPRK; HKKLGIEEPRK; KRKVGIEEPRK;
RKKVGVNNPKH; HKKIGLEEPRK; KRKLGIEEPRK; RRKVGIEEPRK;
HKKVGVNNPKH; KRKIGLEEPRK; RRKLGIEEPRK; HRKVGIEEPRK;
KRKVGVNNPKH; RRKIGLEEPRK; HRKLGIEEPRK; KHRVGIEEPRK;
RRKVGVNNPKH; HRKIGLEEPRK; KHRLGIEEPRK; RHRVGIEEPRK;
HRKVGVNNPKH; KHRIGLEEPRK; RHRLGIEEPRK; HHRVGIEEPRK;
KKRVGIEEPRK; RKRIGVEEPRK; HKRLGLNEPRK; KRRVGLNEPRK;
RKRVGIEEPRK; HKRIGVEEPRK; KRRVGLNEPRK; RRRVGLNEPRK;
HKRVGIEEPRK; KRRIGVEEPRK; RRRVGLNEPRK; HRRVGLNEPRK;
KRRVGIEEPRK; RRRIGVEEPRK; HRRLGLNEPRK; KHHLGINEPRK;
RRRVGIEEPRK; HRRIGVEEPRK; KHHIGLNPRK; RHHLGINEPRK;
HRRVGIEEPRK; KHHVGVEEPRK; RHHIGLNEPRK; HHHLGINEPRK;
KHHLGVEEPRK; RHHVGVEEPRK; HHHIGLNEPRK; KKHLGINEPRK;
RHHLGVEEPRK; HHHVGVEEPRK; KKHIGLNEPRK; RKHLGINEPRK;
HHHLGVEEPRK; KKHVGVEEPRK; RKHIGLNEPRK; HKHLGINEPRK;
KKHLGVEEPRK; RKHVGVEEPRK; HKHIGLNEPRK; KRHLGINEPRK;
RKHLGVEEPRK; HKHVGVEEPRK; KRHIGLNEPRK; RRHLGINEPRK;
HKHLGVEEPRK; KRHVGVEEPRK; RRHIGLNEPRK; HRHLGINEPRK;
KRHLGVEEPRK; RRHVGVEEPRK; HRHIGLNEPRK; KHKLGINEPRK;
RRHLGVEEPRK; HRHVGVEEPRK; KHKIGLNEPRK; RHKLGINEPRK;
HRHLGVEEPRK; KHKVGVEEPRK; RHKIGLNEPRK; HHKLGINEPRK;
KHKLGVEEPRK; RHKVGVEEPRK; HHKIGLNEPRK; KKKLGINEPRK;
RHKLGVEEPRK; HHKVGVEEPRK; KKKIGLNEPRK; RKKLGINEPRK;
HHKLGVEEPRK; KKKVGVEEPRK; RKKIGLNEPRK; HKKLGINEPRK;
KKKLGVEEPRK; RKKVGVEEPRK; HKKIGLNEPRK; KRKLGINEPRK;
RKKLGVEEPRK; HKKVGVEEPRK; KRKIGLNEPRK; RRKLGINEPRK;
HKKLGVEEPRK; KRKVGVEEPRK; RRKIGLNEPRK; HRKLGINEPRK;
KRKLGVEEPRK; RRKVGVEEPRK; HRKIGLNEPRK; KHRLGINEPRK;
RRKLGVEEPRK; HRKVGVEEPRK; KHRIGLNEPRK; RHRLGINEPRK;
HRKLGVEEPRK; KHRVGVEEPRK; RHRIGLNEPRK; HHRLGINEPRK;
KHRLGVEEPRK; RHRVGVEEPRK; HHRIGLNEPRK; KKRLGINEPRK;
RHRLGVEEPRK; HHRVGVEEPRK; KKRIGLNEPRK; RKRLGINEPRK;
HHRLGVEEPRK; KKRVGVEEPRK; RKRIGLNEPRK; HKRLGINEPRK;
KKRLGVEEPRK; RKRVGVEEPRK; HKRIGLNEPRK; KRRLGINEPRK;
RKRLGVEEPRK; HKRVGVEEPRK; KRRIGLNEPRK; RRRLGINEPRK;
HKRLGVEEPRK; KRRVGVEEPRK; RRRIGLNEPRK; HRRLGINEPRK;
KRRLGVEEPRK; RRRVGVEEPRK; HRRIGLNEPRK; KHHIGIENPRK;
RRRLGVEEPRK; HRRVGVEEPRK; KHHVGLNEPRK; RHHIGINEPRK;
HRRLGVEEPRK; KHHLGLNEPRK; RHHVGLNEPRK; HHHIGINEPRK;
KHHIGVEEPRK; RHHLGLNEPRK; HHHVGLNEPRK; KKHIGINEPRK;
RHHIGVEEPRK; HHHLGLNEPRK; KKHVGLNEPRK; RKHIGINEPRK;
HHHIGVEEPRK; KKHLGLNEPRK; RKHVGLNEPRK; HKHIGINEPRK;
KKHIGVEEPRK; RKHLGLNEPRK; HKHVGLNEPRK; KRHIGINEPRK;
RKHIGVEEPRK; HKHLGLNEPRK; KRHVGLNEPRK; RRHIGINEPRK;
HKHIGVEEPRK; KRHLGLNEPRK; RRHVGLNEPRK; HRHIGINEPRK;
KRHIGVEEPRK; RRHLGLNEPRK; HRHVGLNEPRK; KHKIGINEPRK;
RRHIGVEEPRK; HRHLGLNEPRK; KHKVGLNEPRK; RHKIGINEPRK;
HRHIGVEEPRK; KHKLGLNEPRK; RHKVGLNEPRK; HHKIGINEPRK;
KHKIGVEEPRK; RHKLGLNEPRK; HHKVGLNEPRK; KKKIGINEPRK;
RHKIGVEEPRK; HHKLGLNEPRK; KKKVGLNEPRK; RKKIGINEPRK;
HHKIGVEEPRK; KKKLGLNEPRK; RKKVGLNEPRK; HKKIGINEPRK;
KKKIGVEEPRK; RKKLGLNEPRK; HKKVGLNEPRK; KRKIGINEPRK;
RKKIGVEEPRK; HKKLGLNEPRK; KRKVGLNEPRK; RRKIGINEPRK;
HKKIGVEEPRK; KRKLGLNEPRK; RRKVGLNEPRK; HRKIGINEPRK;
KRKIGVEEPRK; RRKLGLNEPRK; HRKVGLNEPRK; KHRIGINEPRK;
RRKIGVEEPRK; HRKLGLNEPRK; KHRVGLNEPRK; RHRIGINEPRK;
HRKIGVEEPRK; KHRLGLNEPRK; RHRVGLNEPRK; HHRIGINEPRK;
KHRIGVEEPRK; RHRLGLNEPRK; HHRVGLNEPRK; KKRIGINEPRK;
RHRIGVEEPRK; HHRLGLNEPRK; KKRVGLNEPRK; RKRIGINEPRK;
HHRIGVEEPRK; KKRLGLNEPRK; RKRVGLNEPRK; HKRIGINEPRK;
KKRIGVEEPRK; RKRLGLNEPRK; HKRVGLNEPRK; KRRIGINEPRK;
RRRIGINEPRK; HRRLGVNEPRK; KHHLGLENPRK; RHHVGLENPRK;
HRRIGINEPRK; KHHIGVNEPRK; RHHLGLENPRK; HHHVGLENPRK;
KHHVGINEPRK; RHHIGVNEPRK; HHHLGLENPRK; KKHVGLENPRK;
RHHVGINEPRK; HHHIGVNEPRK; KKHLGLENPRK; RKHVGLENPRK;
HHHVGINEPRK; KKHIGVNEPRK; RKHLGLENPRK; HKHVGLENPRK;
KKHVGINEPRK; RKHIGVNEPRK; HKHLGLENPRK; KRHVGLENPRK;
RKHVGINEPRK; HKHIGVNEPRK; KRHLGLENPRK; RRHVGLENPRK;
HKHVGINEPRK; KRHIGVNEPRK; RRHLGLENPRK; HRHVGLENPRK;
KRHVGINEPRK; RRHIGVNEPRK; HRHLGLENPRK; KHKVGLENPRK;
RRHVGINEPRK; HRHIGVNEPRK; KHKLGLENPRK; RHKVGLENPRK;
HRHVGINEPRK; KHKIGVNEPRK; RHKLGLENPRK; HHKVGLENPRK;
KHKVGINEPRK; RHKIGVNEPRK; HHKLGLENPRK; KKKVGLENPRK;
RHKVGINEPRK; HHKIGVNEPRK; KKKLGLENPRK; RKKVGLENPRK;
HHKVGINEPRK; KKKIGVNEPRK; RKKLGLENPRK; HKKVGLENPRK;
KKKVGINEPRK; RKKIGVNEPRK; HKKLGLENPRK; KRKVGLENPRK;
RKKVGINEPRK; HKKIGVNEPRK; KRKLGLENPRK; RRKVGLENPRK;
HKKVGINEPRK; KRKIGVNEPRK; RRKLGLENPRK; HRKVGLENPRK;
KRKVGINEPRK; RRKIGVNEPRK; HRKLGLENPRK; KHRVGLENPRK;
RRKVGINEPRK; HRKIGVNEPRK; KHRLGLENPRK; RHRVGLENPRK;
HRKVGINEPRK; KHRIGVNEPRK; RHRLGLENPRK; HHRVGLENPRK;
KHRVGINEPRK; RHRIGVNEPRK; HHRLGLENPRK; KKRVGLENPRK;
RHRVGINEPRK; HHRIGVNEPRK; KKRLGLENPRK; RKRVGLENPRK;
HHRVGINEPRK; KKRIGVNEPRK; RKRLGLENPRK; HKRVGLENPRK;
KKRVGINEPRK; RKRIGVNEPRK; HKRLGLENPRK; KRRVGLENPRK;
RKRVGINEPRK; HKRIGVNEPRK; KRRLGLENPRK; RRRVGLENPRK;
HKRVGINEPRK; KRRIGVNEPRK; RRRLGLENPRK; HRRVGLENPRK;
KRRVGINEPRK; RRRIGVNEPRK; HRRLGLENPRK; KHHLGIENPRK;
RRRVGINEPRK; HRRIGVNEPRK; KHHIGLENPRK; RHHLGIENPRK;
HRRVGINEPRK; KHHVGVNEPRK; RHHIGLENPRK; HHHLGIENPRK;
KHHLGVNEPRK; RHHVGVNEPRK; HHHIGLENPRK; KKHLGIENPRK;
RHHLGVNEPRK; HHHVGVNEPRK; KKHIGLENPRK; RKHLGIENPRK;
HHHLGVNEPRK; KKHVGVNEPRK; RKHIGLENPRK; HKHLGIENPRK;
KKHLGVNEPRK; RKHVGVNEPRK; HKHIGLENPRK; KRHLGIENPRK;
RKHLGVNEPRK; HKHVGVNEPRK; KRHIGLENPRK; RRHLGIENPRK;
HKHLGVNEPRK; KRHVGVNEPRK; RRHIGLENPRK; HRHLGIENPRK;
KRHLGVNEPRK; RRHVGVNEPRK; HRHIGLENPRK; KHKLGIENPRK;
RRHLGVNEPRK; HRHVGVNEPRK; KHKIGLENPRK; RHKLGIENPRK;
HRHLGVNEPRK; KHKVGVNEPRK; RHKIGLENPRK; HHKLGIENPRK;
KHKLGVNEPRK; RHKVGVNEPRK; HHKIGLENPRK; KKKLGIENPRK;
RHKLGVNEPRK; HHKVGVNEPRK; KKKIGLENPRK; RKKLGIENPRK;
HHKLGVNEPRK; KKKVGVNEPRK; RKKIGLENPRK; HKKLGIENPRK;
KKKLGVNEPRK; RKKVGVNEPRK; HKKIGLENPRK; KRKLGIENPRK;
RKKLGVNEPRK; HKKVGVNEPRK; KRKIGLENPRK; RRKLGIENPRK;
HKKLGVNEPRK; KRKVGVNEPRK; RRKIGLENPRK; HRKLGIENPRK;
KRKLGVNEPRK; RRKVGVNEPRK; HRKIGLENPRK; KHRLGIENPRK;
RRKLGVNEPRK; HRKVGVNEPRK; KHRIGLENPRK; RHRLGIENPRK;
HRKLGVNEPRK; KHRVGVNEPRK; RHRIGLENPRK; HHRLGIENPRK;
KHRLGVNEPRK; RHRVGVNEPRK; HHRIGLENPRK; KKRLGIENPRK;
RHRLGVNEPRK; HHRVGVNEPRK; KKRIGLENPRK; RKRLGIENPRK;
HHRLGVNEPRK; KKRVGVNEPRK; RKRIGLENPRK; HKRLGIENPRK;
KKRLGVNEPRK; RKRVGVNEPRK; HKRIGLENPRK; KRRLGIENPRK;
RKRLGVNEPRK; HKRVGVNEPRK; KRRIGLENPRK; RRRLGIENPRK;
HKRLGVNEPRK; KRRVGVNEPRK; RRRIGLENPRK; HRRLGIENPRK;
KRRLGVNEPRK; RRRVGVNEPRK; HRRIGLENPRK; KHHIGIENPRK;
RRRLGVNEPRK; HRRVGVNEPRK; KHHVGLENPRK; RHHIGIENPRK;
HHHIGIENPRK; KKHLGVENPRK; RKHVGVENPRK; HKHIGLNNPRK;
KKHIGIENPRK; RKHLGVENPRK; HKHVGVENPRK; KRHIGLNNPRK;
RKHIGIENPRK; HKHLGVENPRK; KRHVGVENPRK; RRHIGLNNPRK;
HKHIGIENPRK; KRHLGVENPRK; RRHVGVENPRK; HRHIGLNNPRK;
KRHIGIENPRK; RRHLGVENPRK; HRHVGVENPRK; KHKIGLNNPRK;
RRHIGIENPRK; HRHLGVENPRK; KHKVGVENPRK; RHKIGLNNPRK;
HRHIGIENPRK; KHKLGVENPRK; RHKVGVENPRK; HHKIGLNNPRK;
KHKIGIENPRK; RHKLGVENPRK; HHKVGVENPRK; KKKIGLNNPRK;
RHKIGIENPRK; HHKLGVENPRK; KKKVGVENPRK; RKKIGLNNPRK;
HHKIGIENPRK; KKKLGVENPRK; RKKVGVENPRK; HKKIGLNNPRK;
KKKIGIENPRK; RKKLGVENPRK; HKKVGVENPRK; KRKIGLNNPRK;
RKKIGIENPRK; HKKLGVENPRK; KRKVGVENPRK; RRHIGLNNPRK;
HKKIGIENPRK; KRKLGVENPRK; RRKVGVEEPRK; HRKIGLNNPRK;
KRKIGIENPRK; RRKLGVENPRK; HRKVGVENPRK; KHRIGLNNPRK;
RRKIGIENPRK; HRKLGVENPRK; KHRVGVENPRK; RHRIGLNNPRK;
HRKIGIENPRK; KHRLGVENPRK; RHRVGVENPRK; HHRIGLNNPRK;
KHRIGIENPRK; RHRLGVENPRK; HHRVGVENPRK; KKRIGLNNPRK;
RHRIGIENPRK; HHRLGVENPRK; KKRVGVENPRK; RKRIGLNNPRK;
HHRIGIENPRK; KKRLGVENPRK; RKRVGVENPRK; HKRIGLNNPRK;
KKRIGIENPRK; RKRLGVENPRK; HKRVGVENPRK; KRRIGLNNPRK;
RKRIGIENPRK; HKRLGVENPRK; KRRVGVENPRK; RRRIGLNNPRK;
HKRIGIENPRK; KRRLGVENPRK; RRRVGVENPRK; HRRIGLNNPRK;
KRRIGIENPRK; RRRLGVENPRK; HRRVGVENPRK; KHHVGLNNPRK;
RRRIGIENPRK; HRRLGVENPRK; KHHLGLNNPRK; RHHVGLNNPRK;
HRRIGIENPRK; KHHIGVENPRK; RHHLGLNNPRK; HHHVGLNNPRK;
KHHVGIENPRK; RHHIGVEEPRK; HHHLGLNNPRK; KKHVGLNNPRK;
RHHVGIENPRK; HHHIGVENPRK; KKHLGLNNPRK; RKHVGLNNPRK;
HHHVGIENPRK; KKHIGVENPRK; RKHLGLNNPRK; HKHVGLNNPRK;
KKHVGIENPRK; RKHIGVENPRK; HKHLGLNNPRK; KRHVGLNNPRK;
RKHVGIENPRK; HKHIGVENPRK; KRHLGLNNPRK; RRHVGLNNPRK;
HKHVGIENPRK; KRHIGVENPRK; RRHLGLNNPRK; HRHVGLNNPRK;
KRHVGIENPRK; RRHIGVENPRK; HRHLGLNNPRK; KHKVGLNNPRK;
RRHVGIENPRK; HRHIGVENPRK; KHKLGLNNPRK; RHKVGLNNPRK;
HRHVGIENPRK; KHKIGVENPRK; RHKLGLNNPRK; HHKVGLNNPRK;
KHKVGIENPRK; RHKIGVENPRK; HHKLGLNNPRK; KKKVGLNNPRK;
RHKVGIENPRK; HHKIGVENPRK; KKKLGLNNPRK; RKKVGLNNPRK;
HHKVGIENPRK; KKKIGVENPRK; RKKLGLNNPRK; HKKVGLNNPRK;
KKKVGIENPRK; RKKIGVENPRK; HKKLGLNNPRK; KRKVGLNNPRK;
RKKVGIENPRK; HKKIGVENPRK; KRKLGLNNPRK; RRHVGLNNPRK;
HKKVGIENPRK; KRKIGVENPRK; RRKLGLNNPRK; HRKVGLNNPRK;
KRKVGIENPRK; RRKIGVENPRK; HRKLGLNNPRK; KHRVGLNNPRK;
RRKVGIENPRK; HRKIGVENPRK; KHRLGLNNPRK; RHRVGLNNPRK;
HRKVGIENPRK; KHRIGVENPRK; RHRLGLNNPRK; HHRVGLNNPRK;
KHRVGIENPRK; RHRIGVENPRK; HHRLGLNNPRK; KKRVGLNNPRK;
RHRVGIENPRK; HHRIGVENPRK; KKRLGLNNPRK; RKRVGLNNPRK;
HHRVGIENPRK; KKRIGVENPRK; RKRLGLNNPRK; HKRVGLNNPRK;
KKRVGIENPRK; RKRIGVENPRK; HKRLGLNNPRK; KRRVGLNNPRK;
RKRVGIENPRK; HKRIGVENPRK; KRRLGLNNPRK; RRRVGLNNPRK;
HKRVGIENPRK; KRRIGVENPRK; RRRLGLNNPRK; HRRVGLNNPRK;
KRRVGIENPRK; RRRIGVENPRK; HRRLGLNNPRK; KHHLGINNPRK;
RRRVGIENPRK; HRRIGVENPRK; KHHIGLNNPRK; RHHLGINNPRK;
HRRVGIENPRK; KHHVGVENPRK; RHHIGLNNPRK; HHHLGINNPRK;
KHHLGVENPRK; RHHVGVENPRK; HHHIGLNNPRK; KKHLGINNPRK;
RHHLGVENPRK; HHHVGVENPRK; KKHIGLNNPRK; RKHLGINNPRK;
HHHLGVENPRK; KKHVGVENPRK; RKHIGLNNPRK; HKHLGINNPRK;
KRHLGINNPRK; RRHVGINNPRK; HRHIGVNNPRK; KHKLGLEEPHK;
RRHLGINNPRK; HRHVGINNPRK; KHKIGVNNPRK; RHKLGLEEPHK;
HRHLGINNPRK; KHKVGINNPRK; RHKIGVNNPRK; HHKLGLEEPHK;
KHKLGINNPRK; RHKVGINNPRK; HHKIGVNNPRK; KKKLGLEEPHK;
RHKLGINNPRK; HHKVGINNPRK; KKKIGVNNPRK; RKKLGLEEPHK;
HHKLGINNPRK; KKKVGINNPRK; RKKIGVNNPRK; HKKLGLEEPHK;
KKKLGINNPRK; RKKVGINNPRK; HKKIGVNNPRK; KRKLGLEEPHK;
RKKLGINNPRK; HKKVGINNPRK; KRKIGVNNPRK; RRKLGLEEPHK;
HKKLGINNPRK; KRKVGINNPRK; RRKIGVNNPRK; HRKLGLEEPHK;
KRKLGINNPRK; RRKVGINNPRK; HRKIGVNNPRK; KHRLGLEEPHK;
RRKLGINNPRK; HRKVGINNPRK; KHRIGVNNPRK; RHRLGLEEPHK;
HRKLGINNPRK; KHRVGINNPRK; RHRIGVNNPRK; HHRLGLEEPHK;
KHRLGINNPRK; RHRVGINNPRK; HHRIGVNNPRK; KKRLGLEEPHK;
RHRLGINNPRK; HHRVGINNPRK; KKRIGVNNPRK; RKRLGLEEPHK;
HHRLGINNPRK; KKRVGINNPRK; RKRIGVNNPRK; HKRLGLEEPHK;
KKRLGINNPRK; RKRVGINNPRK; HKRIGVNNPRK; KRRLGLEEPHK;
RKRLGINNPRK; HKRVGINNPRK; KRRIGVNNPRK; RRRLGLEEPHK;
HKRLGINNPRK; KRRVGINNPRK; RRRIGVNNPRK; HRRLGLEEPHK;
KRRLGINNPRK; RRRVGINNPRK; HRRIGVNNPRK; KHHIGLEEPHK;
RRRLGINNPRK; HRRVGINNPRK; KHHVGVNNPRK; RHHIGLEEPHK;
HRRLGINNPRK; KHHLGVNNPRK; RHHVGVNNPRK; HHHIGLEEPHK;
KHHIGIENPRK; RHHLGVNNPRK; HHHVGVNNPRK; KKHIGLEEPHK;
RHHIGINNPRK; HHHLGVNNPRK; KKHVGVNNPRK; RKHIGLEEPHK;
HHHIGINNPRK; KKHLGVNNPRK; RKHVGVNNPRK; HKHIGLEEPHK;
KKHIGINNPRK; RKHLGVNNPRK; HKHVGVNNPRK; KRHIGLEEPHK;
RKHIGINNPRK; HKHLGVNNPRK; KRHVGVNNPRK; RRHIGLEEPHK;
HKHIGINNPRK; KRHLGVNNPRK; RRHVGVNNPRK; HRHIGLEEPHK;
KRHIGINNPRK; RRHLGVNNPRK; HRHVGVNNPRK; KHKIGLEEPHK;
RRHIGINNPRK; HRHLGVNNPRK; KHKVGVNNPRK; RHKIGLEEPHK;
HRHIGINNPRK; KHKLGVNNPRK; RHKVGVNNPRK; HHKIGLEEPHK;
KHKIGINNPRK; RHKLGVNNPRK; HHKVGVNNPRK; KKKIGLEEPHK;
RHKIGINNPRK; HHKLGVNNPRK; KKKVGVNNPRK; RKKIGLEEPHK;
HHKIGINNPRK; KKKLGVNNPRK; RKKVGVNNPRK; HKKIGLEEPHK;
KKKIGINNPRK; RKKLGVNNPRK; HKKVGVNNPRK; KRKIGLEEPHK;
RKKIGINNPRK; HKKLGVNNPRK; KRKVGVNNPRK; RRKIGLEEPHK;
HKKIGINNPRK; KRKLGVNNPRK; RRKVGVNNPRK; HRKIGLEEPHK;
KRKIGINNPRK; RRKLGVNNPRK; HRKVGVNNPRK; KHRIGLEEPHK;
RRKIGINNPRK; HRKLGVNNPRK; KHRVGVNNPRK; RHRIGLEEPHK;
HRKIGINNPRK; KHRLGVNNPRK; RHRVGVNNPRK; HHRIGLEEPHK;
KHRIGINNPRK; RHRLGVNNPRK; HHRVGVNNPRK; KKRIGLEEPHK;
RHRIGINNPRK; HHRLGVNNPRK; KKRVGVNNPRK; RKRIGLEEPHK;
HHRIGINNPRK; KKRLGVNNPRK; RKRVGVNNPRK; HKRIGLEEPHK;
KKRIGINNPRK; RKRLGVNNPRK; HKHVGVNNPRK; KRRIGLEEPHK;
RKRIGINNPRK; HKRLGVNNPRK; KRRVGVNNPRK; RRRIGLEEPHK;
HKRIGINNPRK; KRRLGVNNPRK; RRRVGVNNPRK; HRRIGLEEPHK;
KRRIGINNPRK; RRRLGVNNPRK; HRRVGVNNPRK; KHHVGLEEPHK;
RRRIGINNPRK; HRRLGVNNPRK; KHHLGLEEPHK; RHHVGLEEPHK;
HRRIGINNPRK; KHHIGVNNPRK; RHHLGLEEPHK; HHHVGLEEPHK;
KHHVGINNPRK; RHHIGVNNPRK; HHHLGLEEPHK; KKHVGLEEPHK;
RHHVGINNPRK; HHHIGVNNPRK; KKHLGLEEPHK; RKHVGLEEPHK;
HHHVGINNPRK; KKHIGVNNPRK; RKHLGLEEPHK; HKHVGLEEPHK;
KKHVGINNPRK; RKHIGVNNPRK; HKHLGLEEPHK; KRHVGLEEPHK;
RKHVGINNPRK; HKHIGVNNPRK; KRHLGLEEPHK; RRHVGLEEPHK;
HKHVGINNPRK; KRHIGVNNPRK; RRHLGLEEPHK; HRHVGLEEPHK;
KRHVGINNPRK; RRHIGVNNPRK; HRHLGLEEPHK; KHKVGLEEPHK;
RHKVGLEEPHK; HHKIGIEEPHK; KKKLGVEEPHK; RKKVGVEEPHK;
HHKVGLEEPHK; KKKIGIEEPHK; RKKLGVEEPHK; HKKVGVEEPHK;
KKKVGLEEPHK; RKKIGIEEPHK; HKKLGVEEPHK; KRKVGVEEPHK;
RKKVGLEEPHK; HKKIGIEEPHK; KRKLGVEEPHK; RRKVGVEEPHK;
HKKVGLEEPHK; KRKIGIEEPHK; RRKLGVEEPHK; HRKVGVEEPHK;
KRKVGLEEPHK; RRKIGIEEPHK; HRKLGVEEPHK; KHRVGVEEPHK;
RRKVGLEEPHK; HRKIGIEEPHK; KHRLGVEEPHK; RHRVGVEEPHK;
HRKVGLEEPHK; KHRIGIEEPHK; RHRLGVEEPHK; HHRVGVEEPHK;
KHRVGLEEPHK; RHRIGIEEPHK; HHRLGVEEPHK; KKRVGVEEPHK;
RHRVGLEEPHK; HHRIGIEEPHK; KKRLGVEEPHK; RKRVGVEEPHK;
HHRVGLEEPHK; KKRIGIEEPHK; RKRLGVEEPHK; HKRVGVEEPHK;
KKRVGLEEPHK; RKRIGIEEPHK; HKRLGVEEPHK; KRRVGVEEPHK;
RKRVGLEEPHK; HKRIGIEEPHK; KRRLGVEEPHK; RRRVGVEEPHK;
HKRVGLEEPHK; KRRIGIEEPHK; RRRLGVEEPHK; HRRVGVEEPHK;
KRRVGLEEPHK; RRRIGIEEPHK; HRRLGVEEPHK; KHHLGLNEPHK;
RRRVGLEEPHK; HRRIGIEEPHK; KHHIGVEEPHK; RHHLGLNEPHK;
HRRVGLEEPHK; KHHVGIEEPHK; RHHIGVEEPHK; HHHLGLNEPHK;
KHHLGIEEPHK; RHHVGIEEPHK; HHHIGVEEPHK; KKHLGLNEPHK;
RHHLGIEEPHK; HHHVGIEEPHK; KKHIGVEEPHK; RKHLGLNEPHK;
HHHLGIEEPHK; KKHVGIEEPHK; RKHIGVEEPHK; HKHLGLNEPHK;
KKHLGIEEPHK; RKHVGIEEPHK; HKHIGVEEPHK; KRHLGLNEPHK;
RKHLGIEEPHK; HKHVGIEEPHK; KRHIGVEEPHK; RRHLGLNEPHK;
HKHLGIEEPHK; KRHVGIEEPHK; RRHIGVEEPHK; HRHLGLNEPHK;
KRHLGIEEPHK; RRHVGIEEPHK; HRHIGVEEPHK; KHKLGLNEPHK;
RRHLGIEEPHK; HRHVGIEEPHK; KHKIGVEEPHK; RHKLGLNEPHK;
HRKLGIEEPHK; KHKVGIEEPHK; RHKIGVEEPHK; HHKLGLNEPHK;
KHKLGIEEPHK; RHKVGIEEPHK; HHKIGVEEPHK; KKKLGLNEPHK;
RHKLGIEEPHK; HHKVGIEEPHK; KKKIGVEEPHK; RKKLGLNEPHK;
HHKLGIEEPHK; KKKVGIEEPHK; RKKIGVEEPHK; HKKLGLNEPHK;
KKKLGIEEPHK; RKKVGIEEPHK; HKKIGVEEPHK; KRKLGLNEPHK;
RKKLGIEEPHK; HKKVGIEEPHK; KRKIGVEEPHK; RRKLGLNEPHK;
HKKLGIEEPHK; KRKVGIEEPHK; RRKIGVEEPHK; HRKLGLNEPHK;
KRKLGIEEPHK; RRKVGIEEPHK; HRKIGVEEPHK; KHRLGLNEPHK;
RRKLGIEEPHK; HRKVGIEEPHK; KHRIGVEEPHK; RHRLGLNEPHK;
HRKLGIEEPHK; KHRVGIEEPHK; RHRIGVEEPHK; HHRLGLNEPHK;
KHRLGIEEPHK; RHRVGIEEPHK; HHRIGVEEPHK; KKRLGLNEPHK;
RHRLGIEEPHK; HHRVGIEEPHK; KKRIGVEEPHK; RKRLGLNEPHK;
HHRLGIEEPHK; KKRVGIEEPHK; RKRIGVEEPHK; HKRLGLNEPHK;
KKRLGIEEPHK; RKRVGIEEPHK; HKRIGVEEPHK; KRRLGLNEPHK;
RKRLGIEEPHK; HKRVGIEEPHK; KRRIGVEEPHK; RRRLGLNEPHK;
HKRLGIEEPHK; KRRVGIEEPHK; RRRIGVEEPHK; HRRLGLNEPHK;
KRRLGIEEPHK; RRRVGIEEPHK; HRRIGVEEPHK; KHHIGLNPHK;
RRRLGIEEPHK; HRRVGIEEPHK; KHHVGVEEPHK; RHHIGLNEPHK;
HRRLGIEEPHK; KHHLGVEEPHK; RHHVGVEEPHK; HHHIGLNEPHK;
KHHIGIEEPHK; RHHLGVEEPHK; HHHVGVEEPHK; KKHIGLNEPHK;
RHHIGIEEPHK; HHHLGVEEPHK; KKHVGVEEPHK; RKHIGLNEPHK;
HHHIGIEEPHK; KKHLGVEEPHK; RKHVGVEEPHK; HKHIGLNEPHK;
KKHIGIEEPHK; RKHLGVEEPHK; HKHVGVEEPHK; KRHIGLNEPHK;
RKHIGIEEPHK; HKHLGVEEPHK; KRHVGVEEPHK; RRHIGLNEPHK;
HKHIGIEEPHK; KRHLGVEEPHK; RRHVGVEEPHK; HRHIGLNEPHK;
KRHIGIEEPHK; RRHLGVEEPHK; HRHVGVEEPHK; KHKIGLNEPHK;
RRHIGIEEPHK; HRHLGVEEPHK; KHKVGVEEPHK; RHKIGLNEPHK;
HRHIGIEEPHK; KHKLGVEEPHK; RHKVGVEEPHK; HHKIGLNEPHK;
KHKIGIEEPHK; RHKLGVEEPHK; HHKVGVEEPHK; KKKIGLNEPHK;
RHKIGIEEPHK; HHKLGVEEPHK; KKKVGVEEPHK; RKKIGLNEPHK;
HKKIGLNEPHK; KRKLGINEPHK; RRKVGINEPHK; HRKIGVNEPHK;
KRKIGLNEPHK; RRKLGINEPHK; HRKVGINEPHK; KHRIGVNEPHK;
RRKIGLNEPHK; HRKLGINEPHK; KHRVGINEPHK; RHRIGVNEPHK;
HRKIGLNEPHK; KHRLGINEPHK; RHRVGINEPHK; HHRIGVNEPHK;
KHRIGLNEPHK; RHRLGINEPHK; HHRVGINEPHK; KKRIGVNEPHK;
RHRIGLNEPHK; HHRLGINEPHK; KKRVGINEPHK; RKRIGVNEPHK;
HHRIGLNEPHK; KKRLGINEPHK; RKRVGINEPHK; HKRIGVNEPHK;
KKRIGLNEPHK; RKRLGINEPHK; HKRVGINEPHK; KRRIGVNEPHK;
RKRIGLNEPHK; HKRLGINEPHK; KRRVGINEPHK; RRRIGVNEPHK;
HKRIGLNEPHK; KRRLGINEPHK; RRRVGINEPHK; HRRIGVNEPHK;
KRRIGLNEPHK; RRRLGINEPHK; HRRVGINEPHK; KHHVGVNEPHK;
RRRIGLNEPHK; HRRLGINEPHK; KHHLGVNEPHK; RHHVGVNEPHK;
HRRIGLNEPHK; KHHIGIENPHK; RHHLGVNEPHK; HHHVGVNEPHK;
KHHVGLNEPHK; RHHIGINEPHK; HHHLGVNEPHK; KKHVGVNEPHK;
RHHVGLNEPHK; HHHIGINEPHK; KKHLGVNEPHK; RKHVGVNEPHK;
HHHVGLNEPHK; KKHIGINEPHK; RKHLGVNEPHK; HKHVGVNEPHK;
KKHVGLNEPHK; RKHIGINEPHK; HKHLGVNEPHK; KRHVGVNEPHK;
RKHVGLNEPHK; HKHIGINEPHK; KRHLGVNEPHK; RRHVGVNEPHK;
HKHVGLNEPHK; KRHIGINEPHK; RRHLGVNEPHK; HRHVGVNEPHK;
KRHVGLNEPHK; RRHIGINEPHK; HRHLGVNEPHK; KHKVGVNEPHK;
RRHVGLNEPHK; HRHIGINEPHK; KHKLGVNEPHK; RHKVGVNEPHK;
HRHVGLNEPHK; KHKIGINEPHK; RHKLGVNEPHK; HHKVGVNEPHK;
KHKVGLNEPHK; RHKIGINEPHK; HHKLGVNEPHK; KKKVGVNEPHK;
RHKVGLNEPHK; HHKIGINEPHK; KKKLGVNEPHK; RKKVGVNEPHK;
HHKVGLNEPHK; KKKIGINEPHK; RKKLGVNEPHK; HKKVGVNEPHK;
KKKVGLNEPHK; RKKIGINEPHK; HKKLGVNEPHK; KRKVGVNEPHK;
RKKVGLNEPHK; HKKIGINEPHK; KRKLGVNEPHK; RRKVGVNEPHK;
HKKVGLNEPHK; KRKIGINEPHK; RRKLGVNEPHK; HRKVGVNEPHK;
KRKVGLNEPHK; RRKIGINEPHK; HRKLGVNEPHK; KHRVGVNEPHK;
RRKVGLNEPHK; HRKIGINEPHK; KHRLGVNEPHK; RHRVGVNEPHK;
HRKVGLNEPHK; KHRIGINEPHK; RHRLGVNEPHK; HHRVGVNEPHK;
KHRVGLNEPHK; RHRIGINEPHK; HHRLGVNEPHK; KKRVGVNEPHK;
RHRVGLNEPHK; HHRIGINEPHK; KKRLGVNEPHK; RKRVGVNEPHK;
HHRVGLNEPHK; KKRIGINEPHK; RKRLGVNEPHK; HKRVGVNEPHK;
KKRVGLNEPHK; RKRIGINEPHK; HKRLGVNEPHK; KRRVGVNEPHK;
RKRVGLNEPHK; HKRIGINEPHK; KRRLGVNEPHK; RRRVGVNEPHK;
HKRVGLNEPHK; KRRIGINEPHK; RRRLGVNEPHK; HRRVGVNEPHK;
KRRVGLNEPHK; RRRIGINEPHK; HRRLGVNEPHK; KHHLGLENPHK;
RRRVGLNEPHK; HRRIGINEPHK; KHHIGVNEPHK; RHHLGLENPHK;
HRRVGLNEPHK; KHHVGINEPHK; RHHIGVNEPHK; HHHLGLENPHK;
KHHLGINEPHK; RHHVGINEPHK; HHHIGVNEPHK; KKHLGLENPHK;
RHHLGINEPHK; HHHVGINEPHK; KKHIGVNEPHK; RKHLGLENPHK;
HHHLGINEPHK; KKHVGINEPHK; RKHIGVNEPHK; HKHLGLENPHK;
KKHLGINEPHK; RKHVGINEPHK; HKHIGVNEPHK; KRHLGLENPHK;
RKHLGINEPHK; HKHVGINEPHK; KRHIGVNEPHK; RRHLGLENPHK;
HKHLGINEPHK; KRHVGINEPHK; RRHIGVNEPHK; HRHLGLENPHK;
KRHLGINEPHK; RRHVGINEPHK; HRHIGVNEPHK; KHKLGLENPHK;
RRHLGINEPHK; HRHVGINEPHK; KHKIGVNEPHK; RHKLGLENPHK;
HRHLGINEPHK; KHKVGINEPHK; RHKIGVNEPHK; HHKLGLENPHK;
KHKLGINEPHK; RHKVGINEPHK; HHKIGVNEPHK; KKKLGLENPHK;
RHKLGINEPHK; HHKVGINEPHK; KKKIGVNEPHK; RKKLGLENPHK;
HHKLGINEPHK; KKKVGINEPHK; RKKIGVNEPHK; HKKLGLENPHK;
KKKLGINEPHK; RKKVGINEPHK; HKKIGVNEPHK; KRKLGLENPHK;
RKKLGINEPHK; HKKVGINEPHK; KRKIGVNEPHK; RRKLGLENPHK;
HKKLGINEPHK; KRKVGINEPHK; RRKIGVNEPHK; HRKLGLENPHK;
KHRLGLENPHK; RHRVGLENPHK; HHRIGIENPHK; KKRLGVENPHK;
RHRLGLENPHK; HHRVGLENPHK; KKRIGIENPHK; RKRLGVENPHK;
HHRLGLENPHK; KKRVGLENPHK; RKRIGIENPHK; HKRLGVENPHK;
KKRLGLENPHK; RKRVGLENPHK; HKRIGIENPHK; KRRLGVENPHK;
RKRLGLENPHK; HKRVGLENPHK; KRRIGIENPHK; RRRLGVENPHK;
HKRLGLENPHK; KRRVGLENPHK; RRRIGIENPHK; HRRLGVENPHK;
KRRLGLENPHK; RRRVGLENPHK; HRRIGIENPHK; KHHIGVENPHK;
RRRLGLENPHK; HRRVGLENPHK; KHHVGIENPHK; RHHIGVEEPHK;
HRRLGLENPHK; KHHLGIENPHK; RHHVGIENPHK; HHHIGVENPHK;
KHHIGLENPHK; RHHLGIENPHK; HHHVGIENPHK; KKHIGVENPHK;
RHHIGLENPHK; HHHLGIENPHK; KKHVGIENPHK; RKHIGVENPHK;
HHHIGLENPHK; KKHLGIENPHK; RKHVGIENPHK; HKHIGVENPHK;
KKHIGLENPHK; RKHLGIENPHK; HKHVGIENPHK; KRHIGVENPHK;
RKHIGLENPHK; HKHLGIENPHK; KRHVGIENPHK; RRHIGVENPHK;
HKHIGLENPHK; KRHLGIENPHK; RRHVGIENPHK; HRHIGVENPHK;
KRHIGLENPHK; RRHLGIENPHK; HRHVGIENPHK; KHKIGVENPHK;
RRHIGLENPHK; HRHLGIENPHK; KHKVGIENPHK; RHKIGVENPHK;
HRHIGLENPHK; KHKLGIENPHK; RHKVGIENPHK; HHKIGVENPHK;
KHKIGLENPHK; RHKLGIENPHK; HHKVGIENPHK; KKKIGVENPHK;
RHKIGLENPHK; HHKLGIENPHK; KKKVGIENPHK; RKKIGVENPHK;
HHKIGLENPHK; KKKLGIENPHK; RKKVGIENPHK; HKKIGVENPHK;
KKKIGLENPHK; RKKLGIENPHK; HKKVGIENPHK; KRKIGVENPHK;
RKKIGLENPHK; HKKLGIENPHK; KRKVGIENPHK; RRKIGVENPHK;
HKKIGLENPHK; KRKLGIENPHK; RRKVGIENPHK; HRKIGVENPHK;
KRKIGLENPHK; RRKLGIENPHK; HRKVGIENPHK; KHRIGVENPHK;
RRKIGLENPHK; HRKLGIENPHK; KHRVGIENPHK; RHRIGVENPHK;
HRKIGLENPHK; KHRLGIENPHK; RHRVGIENPHK; HHRIGVENPHK;
KHRIGLENPHK; RHRLGIENPHK; HHRVGIENPHK; KKRIGVENPHK;
RHRIGLENPHK; HHRLGIENPHK; KKRVGIENPHK; RKRIGVENPHK;
HHRIGLENPHK; KKRLGIENPHK; RKRVGIENPHK; HKRIGVENPHK;
KKRIGLENPHK; RKRLGIENPHK; HKRVGIENPHK; KRRIGVENPHK;
RKRIGLENPHK; HKRLGIENPHK; KRRVGIENPHK; RRRIGVENPHK;
HKRIGLENPHK; KRRLGIENPHK; RRRVGIENPHK; HRRIGVENPHK;
KRRIGLENPHK; RRRLGIENPHK; HRRVGIENPHK; KHHVGVENPHK;
RRRIGLENPHK; HRRLGIENPHK; KHHLGVENPHK; RHHVGVENPHK;
HRRIGLENPHK; KHHIGIENPHK; RHHLGVENPHK; HHHVGVENPHK;
KHHVGLENPHK; RHHIGIENPHK; HHHLGVENPHK; KKHVGVENPHK;
RHHVGLENPHK; HHHIGIENPHK; KKHLGVENPHK; RKHVGVENPHK;
HHHVGLENPHK; KKHIGIENPHK; RKHLGVENPHK; HKHVGVENPHK;
KKHVGLENPHK; RKHIGIENPHK; HKHLGVENPHK; KRHVGVENPHK;
RKHVGLENPHK; HKHIGIENPHK; KRHLGVENPHK; RRHVGVENPHK;
HKHVGLENPHK; KRHIGIENPHK; RRHLGVENPHK; HRHVGVENPHK;
KRHVGLENPHK; RRHIGIENPHK; HRHLGVENPHK; KHKVGVENPHK;
RRHVGLENPHK; HRHIGIENPHK; KHKLGVENPHK; RHKVGVENPHK;
HRHVGLENPHK; KHKIGIENPHK; RHKLGVENPHK; HHKVGVENPHK;
KHKVGLENPHK; RHKIGIENPHK; HHKLGVENPHK; KKKVGVENPHK;
RHKVGLENPHK; HHKIGIENPHK; KKKLGVENPHK; RKKVGVENPHK;
HHKVGLENPHK; KKKIGIENPHK; RKKLGVENPHK; HKKVGVENPHK;
KKKVGLENPHK; RKKIGIENPHK; HKKLGVENPHK; KRKVGVENPHK;
RKKVGLENPHK; HKKIGIENPHK; KRKLGVENPHK; RRKVGVEEPHK;
HKKVGLENPHK; KRKIGIENPHK; RRKLGVENPHK; HRKVGVENPHK;
KRKVGLENPHK; RRKIGIENPHK; HRKLGVENPHK; KHRVGVENPHK;
RRKVGLENPHK; HRKIGIENPHK; KHRLGVENPHK; RHRVGVENPHK;
HRKVGLENPHK; KHRIGIENPHK; RHRLGVENPHK; HHRVGVENPHK;
KHRVGLENPHK; RHRIGIENPHK; HHRLGVENPHK; KKRVGVENPHK;
RKRVGVENPHK; HKRIGLNNPHK; KRRLGINNPHK; RRRVGINNPHK;
HKRVGVENPHK; KRRIGLNNPHK; RRRLGINNPHK; HRRVGINNPHK;
KRRVGVENPHK; RRRIGLNNPHK; HRRLGINNPHK; KHHLGVNNPHK;
RRRVGVENPHK; HRRIGLNNPHK; KHHIGIENPHK; RHHLGVNNPHK;
HRRVGVENPHK; KHHVGLNNPHK; RHHIGINNPHK; HHHLGVNNPHK;
KHHLGLNNPHK; RHHVGLNNPHK; HHHIGINNPHK; KKHLGVNNPHK;
RHHLGLNNPHK; HHHVGLNNPHK; KKHIGINNPHK; RKHLGVNNPHK;
HHHLGLNNPHK; KKHVGLNNPHK; RHHIGINNPHK; HKHLGVNNPHK;
KKHLGLNNPHK; RKHVGLNNPHK; HKHIGINNPHK; KRHLGVNNPHK;
RKHLGLNNPHK; HKHVGLNNPHK; KRHIGINNPHK; RRHLGVNNPHK;
HKHLGLNNPHK; KRHVGLNNPHK; RRHIGINNPHK; HRHLGVNNPHK;
KRHLGLNNPHK; RRHVGLNNPHK; HRHIGINNPHK; KHKLGVNNPHK;
RRHLGLNNPHK; HRHVGLNNPHK; KHKIGINNPHK; RHKLGVNNPHK;
HRHLGLNNPHK; KHKVGLNNPHK; RHKIGINNPHK; HHKLGVNNPHK;
KHKLGLNNPHK; RHKVGLNNPHK; HHKIGINNPHK; KKKLGVNNPHK;
RHKLGLNNPHK; HHKVGLNNPHK; KKKIGINNPHK; RKKLGVNNPHK;
HHKLGLNNPHK; KKKVGLNNPHK; RKKIGINNPHK; HKKLGVNNPHK;
KKKLGLNNPHK; RKKVGLNNPHK; HKKIGINNPHK; KRKLGVNNPHK;
RKKLGLNNPHK; HKKVGLNNPHK; KRKIGINNPHK; RRKLGVNNPHK;
HKKLGLNNPHK; KRKVGLNNPHK; RRKIGINNPHK; HRKLGVNNPHK;
KRKLGLNNPHK; RRKVGLNNPHK; HRKIGINNPHK; KHRLGVNNPHK;
RRKLGLNNPHK; HRKVGLNNPHK; KHRIGINNPHK; RHRLGVNNPHK;
HRKLGLNNPHK; KHRVGLNNPHK; RHRIGINNPHK; HHRLGVNNPHK;
KHRLGLNNPHK; RHRVGLNNPHK; HHRIGINNPHK; KKRLGVNNPHK;
RHRLGLNNPHK; HHRVGLNNPHK; KKRIGINNPHK; RKRLGVNNPHK;
HHRLGLNNPHK; KKRVGLNNPHK; RKRIGINNPHK; HKRLGVNNPHK;
KKRLGLNNPHK; RKRVGLNNPHK; HKRIGINNPHK; KRRLGVNNPHK;
RKRLGLNNPHK; HKRVGLNNPHK; KRRIGINNPHK; RRRLGVNNPHK;
HKRLGLNNPHK; KRRVGLNNPHK; RRRIGINNPHK; HRRLGVNNPHK;
KRRLGLNNPHK; RRRVGLNNPHK; HRRIGINNPHK; KHHIGVNNPHK;
RRRLGLNNPHK; HRRVGLNNPHK; KHHVGINNPHK; RHHIGVNNPHK;
HRRLGLNNPHK; KHHLGINNPHK; RHHVGINNPHK; HHHIGVNNPHK;
KHHIGLNNPHK; RHHLGINNPHK; HHHVGINNPHK; KKHIGVNNPHK;
RHHIGLNNPHK; HHHLGINNPHK; KKHVGINNPHK; RKHIGVNNPHK;
HHHIGLNNPHK; KKHLGINNPHK; RKHVGINNPHK; HKHIGVNNPHK;
KKHIGLNNPHK; RKHLGINNPHK; HKHVGINNPHK; KRHIGVNNPHK;
RKHIGLNNPHK; HKHLGINNPHK; KRHVGINNPHK; RRHIGVNNPHK;
HKHIGLNNPHK; KRHLGINNPHK; RRHVGINNPHK; HRHIGVNNPHK;
KRHIGLNNPHK; RRHLGINNPHK; HRHVGINNPHK; KHKIGVNNPHK;
RRHIGLNNPHK; HRHLGINNPHK; KHKVGINNPHK; RHKIGVNNPHK;
HRHIGLNNPHK; KHKLGINNPHK; RHKVGINNPHK; HHKIGVNNPHK;
KHKIGLNNPHK; RHKLGINNPHK; HHKVGINNPHK; KKKIGVNNPHK;
RHKIGLNNPHK; HHKLGINNPHK; KKKVGINNPHK; RKKIGVNNPHK;
HHKIGLNNPHK; KKKLGINNPHK; RKKVGINNPHK; HKKIGVNNPHK;
KKKIGLNNPHK; RKKLGINNPHK; HKKVGINNPHK; KRKIGVNNPHK;
RKKIGLNNPHK; HKKLGINNPHK; KRKVGINNPHK; RRKIGVNNPHK;
HKKIGLNNPHK; KRKLGINNPHK; RRKVGINNPHK; HRKIGVNNPHK;
KRKIGLNNPHK; RRKLGINNPHK; HRKVGINNPHK; KHRIGVNNPHK;
RRKIGLNNPHK; HRKLGINNPHK; KHRVGINNPHK; RHRIGVNNPHK;
HRKIGLNNPHK; KHRLGINNPHK; RHRVGINNPHK; HHRIGVNNPHK;
KHRIGLNNPHK; RHRLGINNPHK; HHRVGINNPHK; KKRIGVNNPHK;
RHRIGLNNPHK; HHRLGINNPHK; KKRVGINNPHK; RKRIGVNNPHK;
HHRIGLNNPHK; KKRLGINNPHK; RKRVGINNPHK; HKRIGVNNPHK;
KKRIGLNNPHK; RKRLGINNPHK; HKRVGINNPHK; KRRIGVNNPHK;
RKRIGLNNPHK; HKRLGINNPHK; KRRVGINNPHK; RRRIGVNNPHK;
HRRIGVNNPHK; KHHIGLEEPRR; RHHLGIEEPRR; HHHVGIEEPRR;
KHHVGVNNPHK; RHHIGLEEPRR; HHHLGIEEPRR; KKHVGIEEPRR;
RHHVGVNNPHK; HHHIGLEEPRR; KKHLGIEEPRR; RKHVGIEEPRR;
HHHVGVNNPHK; KKHIGLEEPRR; RKHLGIEEPRR; HKHVGIEEPRR;
KKHVGVNNPHK; RKHIGLEEPRR; HKHLGIEEPRR; KRHVGIEEPRR;
RKHVGVNNPHK; HKHIGLEEPRR; KRHLGIEEPRR; RRHVGIEEPRR;
HKHVGVNNPHK; KRHIGLEEPRR; RRHLGIEEPRR; HRHVGIEEPRR;
KRHVGVNNPHK; RRHIGLEEPRR; HRHLGIEEPRR; KHKVGIEEPRR;
RRHVGVNNPHK; HRHIGLEEPRR; KHKLGIEEPRR; RHKVGIEEPRR;
HRHVGVNNPHK; KHKIGLEEPRR; RHKLGIEEPRR; HHKVGIEEPRR;
KHKVGVNNPHK; RHKIGLEEPRR; HHKLGIEEPRR; KKKVGIEEPRR;
RHKVGVNNPHK; HHKIGLEEPRR; KKKLGIEEPRR; RKKVGIEEPRR;
HHKVGVNNPHK; KKKIGLEEPRR; RKKLGIEEPRR; HKKVGIEEPRR;
KKKVGVNNPHK; RKKIGLEEPRR; HKKLGIEEPRR; KRKVGIEEPRR;
RKKVGVNNPHK; HKKIGLEEPRR; KRKLGIEEPRR; RRKVGIEEPRR;
HKKVGVNNPHK; KRKIGLEEPRR; RRKLGIEEPRR; HRKVGIEEPRR;
KRKVGVNNPHK; RRKIGLEEPRR; HRKLGIEEPRR; KHRVGIEEPRR;
RRKVGVNNPHK; HRKIGLEEPRR; KHRLGIEEPRR; RHRVGIEEPRR;
HRKVGVNNPHK; KHRIGLEEPRR; RHRLGIEEPRR; HHRVGIEEPRR;
KHRVGVNNPHK; RHRIGLEEPRR; HHRLGIEEPRR; KKRVGIEEPRR;
RHRVGVNNPHK; HHRIGLEEPRR; KKRLGIEEPRR; RKRVGIEEPRR;
HHRVGVNNPHK; KKRIGLEEPRR; RKRLGIEEPRR; HKRVGIEEPRR;
KKRVGVNNPHK; RKRIGLEEPRR; HKRLGIEEPRR; KRRVGIEEPRR;
RKRVGVNNPHK; HKRIGLEEPRR; KRRLGIEEPRR; RRRVGIEEPRR;
HKRVGVNNPHK; KRRIGLEEPRR; RRRLGIEEPRR; HRRVGIEEPRR;
KRRVGVNNPHK; RRRIGLEEPRR; HRRLGIEEPRR; KHHLGVEEPRR;
RRRVGVNNPHK; HRRIGLEEPRR; KHHIGIEEPRR; RHHLGVEEPRR;
HRRVGVNNPHK; KHHVGLEEPRR; RHHIGIEEPRR; HHHLGVEEPRR;
KHHLGLEEPRR; RHHVGLEEPRR; HHHIGIEEPRR; KKHLGVEEPRR;
RHHLGLEEPRR; HHHVGLEEPRR; KKHIGIEEPRR; RKHLGVEEPRR;
HHHLGLEEPRR; KKHVGLEEPRR; RKHIGIEEPRR; HKHLGVEEPRR;
KKHLGLEEPRR; RKHVGLEEPRR; HKHIGIEEPRR; KRHLGVEEPRR;
RKHLGLEEPRR; HKHVGLEEPRR; KRHIGIEEPRR; RRHLGVEEPRR;
HKHLGLEEPRR; KRHVGLEEPRR; RRHIGIEEPRR; HRHLGVEEPRR;
KRHLGLEEPRR; RRHVGLEEPRR; HRHIGIEEPRR; KHKLGVEEPRR;
RRHLGLEEPRR; HRHVGLEEPRR; KHKIGIEEPRR; RHKLGVEEPRR;
HRHLGLEEPRR; KHKVGLEEPRR; RHKIGIEEPRR; HHKLGVEEPRR;
KHKLGLEEPRR; RHKVGLEEPRR; HHKIGIEEPRR; KKKLGVEEPRR;
RHKLGLEEPRR; HHKVGLEEPRR; KKKIGIEEPRR; RKKLGVEEPRR;
HHKLGLEEPRR; KKKVGLEEPRR; RKKIGIEEPRR; HKKLGVEEPRR;
KKKLGLEEPRR; RKKVGLEEPRR; HKKIGIEEPRR; KRKLGVEEPRR;
RKKLGLEEPRR; HKKVGLEEPRR; KRKIGIEEPRR; RRKLGVEEPRR;
HKKLGLEEPRR; KRKVGLEEPRR; RRKIGIEEPRR; HRKLGVEEPRR;
KRKLGLEEPRR; RRKVGLEEPRR; HRKIGIEEPRR; KHRLGVEEPRR;
RRKLGLEEPRR; HRKVGLEEPRR; KHRIGIEEPRR; RHRLGVEEPRR;
HRKLGLEEPRR; KHRVGLEEPRR; RHRIGIEEPRR; HHRLGVEEPRR;
KHRLGLEEPRR; RHRVGLEEPRR; HHRIGIEEPRR; KKRLGVEEPRR;
RHRLGLEEPRR; HHRVGLEEPRR; KKRIGIEEPRR; RKRLGVEEPRR;
HHRLGLEEPRR; KKRVGLEEPRR; RKRIGIEEPRR; HKRLGVEEPRR;
KKRLGLEEPRR; RKRVGLEEPRR; HKRIGIEEPRR; KRRLGVEEPRR;
RKRLGLEEPRR; HKRVGLEEPRR; KRRIGIEEPRR; RRRLGVEEPRR;
HKRLGLEEPRR; KRRVGLEEPRR; RRRIGIEEPRR; HRRLGVEEPRR;
KRRLGLEEPRR; RRRVGLEEPRR; HRRIGIEEPRR; KHHIGVEEPRR;
RRRLGLEEPRR; HRRVGLEEPRR; KHHVGIEEPRR; RHHIGVEEPRR;
HRRLGLEEPRR; KHHLGIEEPRR; RHHVGIEEPRR; HHHIGVEEPRR;
KKHIGVEEPRR; RKHLGLNEPRR; HKHVGLNEPRR; KRHIGINEPRR;
RKHIGVEEPRR; HKHLGLNEPRR; KRHVGLNEPRR; RRHIGINEPRR;
HKHIGVEEPRR; KRHLGLNEPRR; RRHVGLNEPRR; HRHIGINEPRR;
KRHIGVEEPRR; RRHLGLNEPRR; HRHVGLNEPRR; KHKIGINEPRR;
RRHIGVEEPRR; HRHLGLNEPRR; KHKVGLNEPRR; RHKIGINEPRR;
HRHIGVEEPRR; KHKLGLNEPRR; RHKVGLNEPRR; HHKIGINEPRR;
KHKIGVEEPRR; RHKLGLNEPRR; HHKVGLNEPRR; KKKIGINEPRR;
RHKIGVEEPRR; HHKLGLNEPRR; KKKVGLNEPRR; RKKIGINEPRR;
HHKIGVEEPRR; KKKLGLNEPRR; RKKVGLNEPRR; HKKIGINEPRR;
KKKIGVEEPRR; RKKLGLNEPRR; HKKVGLNEPRR; KRKIGINEPRR;
RKKIGVEEPRR; HKKLGLNEPRR; KRKVGLNEPRR; RRKIGINEPRR;
HKKIGVEEPRR; KRKLGLNEPRR; RRKVGLNEPRR; HRKIGINEPRR;
KRKIGVEEPRR; RRKLGLNEPRR; HRKVGLNEPRR; KHRIGINEPRR;
RRKIGVEEPRR; HRKLGLNEPRR; KHRVGLNEPRR; RHRIGINEPRR;
HRKIGVEEPRR; KHRLGLNEPRR; RHRVGLNEPRR; HHRIGINEPRR;
KHRIGVEEPRR; RHRLGLNEPRR; HHRVGLNEPRR; KKRIGINEPRR;
RHRIGVEEPRR; HHRLGLNEPRR; KKRVGLNEPRR; RKRIGINEPRR;
HHRIGVEEPRR; KKRLGLNEPRR; RKRVGLNEPRR; HKRIGINEPRR;
KKRIGVEEPRR; RKRLGLNEPRR; HKRVGLNEPRR; KRRIGINEPRR;
RKRIGVEEPRR; HKRLGLNEPRR; KRRVGLNEPRR; RRRIGINEPRR;
HKRIGVEEPRR; KRRLGLNEPRR; RRRVGLNEPRR; HRRIGINEPRR;
KRRIGVEEPRR; RRRLGLNEPRR; HRRVGLNEPRR; KHHVGINEPRR;
RRRIGVEEPRR; HRRLGLNEPRR; KHHLGINEPRR; RHHVGINEPRR;
HRRIGVEEPRR; KHHIGLNPRR; RHHLGINEPRR; HHHVGINEPRR;
KHHVGVEEPRR; RHHIGLNEPRR; HHHLGINEPRR; KKHVGINEPRR;
RHHVGVEEPRR; HHHIGLNEPRR; KKHLGINEPRR; RKHVGINEPRR;
HHHVGVEEPRR; KKHIGLNEPRR; RKHLGINEPRR; HKHVGINEPRR;
KKHVGVEEPRR; RKHIGLNEPRR; HKHLGINEPRR; KRHVGINEPRR;
RKHVGVEEPRR; HKHIGLNEPRR; KRHLGINEPRR; RRHVGINEPRR;
HKHVGVEEPRR; KRHIGLNEPRR; RRHLGINEPRR; HRHVGINEPRR;
KRHVGVEEPRR; RRHIGLNEPRR; HRHLGINEPRR; KHKVGINEPRR;
RRHVGVEEPRR; HRHIGLNEPRR; KHKLGINEPRR; RHKVGINEPRR;
HRHVGVEEPRR; KHKIGLNEPRR; RHKLGINEPRR; HHKVGINEPRR;
KHKVGVEEPRR; RHKIGLNEPRR; HHKLGINEPRR; KKKVGINEPRR;
RHKVGVEEPRR; HHKIGLNEPRR; KKKLGINEPRR; RKKVGINEPRR;
HHKVGVEEPRR; KKKIGLNEPRR; RKKLGINEPRR; HKKVGINEPRR;
KKKVGVEEPRR; RKKIGLNEPRR; HKKLGINEPRR; KRKVGINEPRR;
RKKVGVEEPRR; HKKIGLNEPRR; KRKLGINEPRR; RRKVGINEPRR;
HKKVGVEEPRR; KRKIGLNEPRR; RRKLGINEPRR; HRKVGINEPRR;
KRKVGVEEPRR; RRKIGLNEPRR; HRKLGINEPRR; KHRVGINEPRR;
RRKVGVEEPRR; HRKIGLNEPRR; KHRLGINEPRR; RHRVGINEPRR;
HRKVGVEEPRR; KHRIGLNEPRR; RHRLGINEPRR; HHRVGINEPRR;
KHRVGVEEPRR; RHRIGLNEPRR; HHRLGINEPRR; KKRVGINEPRR;
RHRVGVEEPRR; HHRIGLNEPRR; KKRLGINEPRR; RKRVGINEPRR;
HHRVGVEEPRR; KKRIGLNEPRR; RKRLGINEPRR; HKRVGINEPRR;
KKRVGVEEPRR; RKRIGLNEPRR; HKRLGINEPRR; KRRVGINEPRR;
RKRVGVEEPRR; HKRIGLNEPRR; KRRLGINEPRR; RRRVGINEPRR;
HKRVGVEEPRR; KRRIGLNEPRR; RRRLGINEPRR; HRRVGINEPRR;
KRRVGVEEPRR; RRRIGLNEPRR; HRRLGINEPRR; KHHLGVNEPRR;
RRRVGVEEPRR; HRRIGLNEPRR; KHHIGINEPRR; RHHLGVNEPRR;
HRRVGVEEPRR; KHHVGLNEPRR; RHHIGINEPRR; HHHLGVNEPRR;
KHHLGLNEPRR; RHHVGLNEPRR; HHHIGINEPRR; KKHLGVNEPRR;
RHHLGLNEPRR; HHHVGLNEPRR; KKHIGINEPRR; RKHLGVNEPRR;
HHHLGLNEPRR; KKHVGLNEPRR; RKHIGINEPRR; HKHLGVNEPRR;
KKHLGLNEPRR; RKHVGLNEPRR; HKHIGINEPRR; KRHLGVNEPRR;
RRHLGVNEPRR; HRHVGVNEPRR; KHKIGLENPRR; RHKLGIENPRR;
HRHLGVNEPRR; KHKVGVNEPRR; RHKIGLENPRR; HHKLGIENPRR;
KHKLGVNEPRR; RHKVGVNEPRR; HHKIGLENPRR; KKKLGIENPRR;
RHKLGVNEPRR; HHKVGVNEPRR; KKKIGLENPRR; RKKLGIENPRR;
HHKLGVNEPRR; KKKVGVNEPRR; RKKIGLENPRR; HKKLGIENPRR;
KKKLGVNEPRR; RKKVGVNEPRR; HKKIGLENPRR; KRKLGIENPRR;
RKKLGVNEPRR; HKKVGVNEPRR; KRKIGLENPRR; RRKLGIENPRR;
HKKLGVNEPRR; KRKVGVNEPRR; RRKIGLENPRR; HRKLGIENPRR;
KRKLGVNEPRR; RRKVGVNEPRR; HRKIGLENPRR; KHRLGIENPRR;
RRKLGVNEPRR; HRKVGVNEPRR; KHRIGLENPRR; RHRLGIENPRR;
HRKLGVNEPRR; KHRVGVNEPRR; RHRIGLENPRR; HHRLGIENPRR;
KHRLGVNEPRR; RHRVGVNEPRR; HHRIGLENPRR; KKRLGIENPRR;
RHRLGVNEPRR; HHRVGVNEPRR; KKRIGLENPRR; RKRLGIENPRR;
HHRLGVNEPRR; KKRVGVNEPRR; RKRIGLENPRR; HKRLGIENPRR;
KKRLGVNEPRR; RKRVGVNEPRR; HKRIGLENPRR; KRRLGIENPRR;
RKRLGVNEPRR; HKRVGVNEPRR; KRRIGLENPRR; RRRLGIENPRR;
HKRLGVNEPRR; KRRVGVNEPRR; RRRIGLENPRR; HRRLGIENPRR;
KRRLGVNEPRR; RRRVGVNEPRR; HRRIGLENPRR; KHHIGIENPRR;
RRRLGVNEPRR; HRRVGVNEPRR; KHHVGLENPRR; RHHIGIENPRR;
HRRLGVNEPRR; KHHLGLENPRR; RHHVGLENPRR; HHHIGIENPRR;
KHHIGVNEPRR; RHHLGLENPRR; HHHVGLENPRR; KKHIGIENPRR;
RHHIGVNEPRR; HHHLGLENPRR; KKHVGLENPRR; RKHIGIENPRR;
HHHIGVNEPRR; KKHLGLENPRR; RKHVGLENPRR; HKHIGIENPRR;
KKHIGVNEPRR; RKHLGLENPRR; HKHVGLENPRR; KRHIGIENPRR;
RKHIGVNEPRR; HKHLGLENPRR; KRHVGLENPRR; RRHIGIENPRR;
HKHIGVNEPRR; KRHLGLENPRR; RRHVGLENPRR; HRHIGIENPRR;
KRHIGVNEPRR; RRHLGLENPRR; HRHVGLENPRR; KHKIGIENPRR;
RRHIGVNEPRR; HRHLGLENPRR; KHKVGLENPRR; RHKIGIENPRR;
HRHIGVNEPRR; KHKLGLENPRR; RHKVGLENPRR; HHKIGIENPRR;
KHKIGVNEPRR; RHKLGLENPRR; HHKVGLENPRR; KKKIGIENPRR;
RHKIGVNEPRR; HHKLGLENPRR; KKKVGLENPRR; RKKIGIENPRR;
HHKIGVNEPRR; KKKLGLENPRR; RKKVGLENPRR; HKKIGIENPRR;
KKKIGVNEPRR; RKKLGLENPRR; HKKVGLENPRR; KRKIGIENPRR;
RKKIGVNEPRR; HKKLGLENPRR; KRKVGLENPRR; RRKIGIENPRR;
HKKIGVNEPRR; KRKLGLENPRR; RRKVGLENPRR; HRKIGIENPRR;
KRKIGVNEPRR; RRKLGLENPRR; HRKVGLENPRR; KHRIGIENPRR;
RRKIGVNEPRR; HRKLGLENPRR; KHRVGLENPRR; RHRIGIENPRR;
HRKIGVNEPRR; KHRLGLENPRR; RHRVGLENPRR; HHRIGIENPRR;
KHRIGVNEPRR; RHRLGLENPRR; HHRVGLENPRR; KKRIGIENPRR;
RHRIGVNEPRR; HHRLGLENPRR; KKRVGLENPRR; RKRIGIENPRR;
HHRIGVNEPRR; KKRLGLENPRR; RKRVGLENPRR; HKRIGIENPRR;
KKRIGVNEPRR; RKRLGLENPRR; HKRVGLENPRR; KRRIGIENPRR;
RKRIGVNEPRR; HKRLGLENPRR; KRRVGLENPRR; RRRIGIENPRR;
HKRIGVNEPRR; KRRLGLENPRR; RRRVGLENPRR; HRRIGIENPRR;
KRRIGVNEPRR; RRRLGLENPRR; HRRVGLENPRR; KHHVGIENPRR;
RRRIGVNEPRR; HRRLGLENPRR; KHHLGIENPRR; RHHVGIENPRR;
HRRIGVNEPRR; KHHIGLENPRR; RHHLGIENPRR; HHHVGIENPRR;
KHHVGVNEPRR; RHHIGLENPRR; HHHLGIENPRR; KKHVGIENPRR;
RHHVGVNEPRR; HHHIGLENPRR; KKHLGIENPRR; RKHVGIENPRR;
HHHVGVNEPRR; KKHIGLENPRR; RKHLGIENPRR; HKHVGIENPRR;
KKHVGVNEPRR; RKHIGLENPRR; HKHLGIENPRR; KRHVGIENPRR;
RKHVGVNEPRR; HKHIGLENPRR; KRHLGIENPRR; RRHVGIENPRR;
HKHVGVNEPRR; KRHIGLENPRR; RRHLGIENPRR; HRHVGIENPRR;
KRHVGVNEPRR; RRHIGLENPRR; HRHLGIENPRR; KHKVGIENPRR;
RRHVGVNEPRR; HRHIGLENPRR; KHKLGIENPRR; RHKVGIENPRR;
HHKVGIENPRR; KKKIGVENPRR; RKKLGLNNPRR; HKKVGLNNPRR;
KKKVGIENPRR; RKKIGVENPRR; HKKLGLNNPRR; KRKVGLNNPRR;
RKKVGIENPRR; HKKIGVENPRR; KRKLGLNNPRR; RRKVGLNNPRR;
HKKVGIENPRR; KRKIGVENPRR; RRKLGLNNPRR; HRKVGLNNPRR;
KRKVGIENPRR; RRKIGVENPRR; HRKLGLNNPRR; KHRVGLNNPRR;
RRKVGIENPRR; HRKIGVENPRR; KHRLGLNNPRR; RHRVGLNNPRR;
HRKVGIENPRR; KHRIGVENPRR; RHRLGLNNPRR; HHRVGLNNPRR;
KHRVGIENPRR; RHRIGVENPRR; HHRLGLNNPRR; KKRVGLNNPRR;
RHRVGIENPRR; HHRIGVENPRR; KKRLGLNNPRR; RKRVGLNNPRR;
HHRVGIENPRR; KKRIGVENPRR; RKRLGLNNPRR; HKRVGLNNPRR;
KKRVGIENPRR; RKRIGVENPRR; HKRLGLNNPRR; KRRVGLNNPRR;
RKRVGIENPRR; HKRIGVENPRR; KRRLGLNNPRR; RRRVGLNNPRR;
HKRVGIENPRR; KRRIGVENPRR; RRRLGLNNPRR; HRRVGLNNPRR;
KRRVGIENPRR; RRRIGVENPRR; HRRLGLNNPRR; KHHLGINNPRR;
RRRVGIENPRR; HRRIGVENPRR; KHHIGLNNPRR; RHHLGINNPRR;
HRRVGIENPRR; KHHVGVENPRR; RHHIGLNNPRR; HHHLGINNPRR;
KHHLGVENPRR; RHHVGVENPRR; HHHIGLNNPRR; KKHLGINNPRR;
RHHLGVENPRR; HHHVGVENPRR; KKHIGLNNPRR; RKHLGINNPRR;
HHHLGVENPRR; KKHVGVENPRR; RKHIGLNNPRR; HKHLGINNPRR;
KKHLGVENPRR; RKHVGVENPRR; HKHIGLNNPRR; KRHLGINNPRR;
RKHLGVENPRR; HKHVGVENPRR; KRHIGLNNPRR; RRHLGINNPRR;
HKHLGVENPRR; KRHVGVENPRR; RRHIGLNNPRR; HRHLGINNPRR;
KRHLGVENPRR; RRHVGVENPRR; HRHIGLNNPRR; KHKLGINNPRR;
RRHLGVENPRR; HRHVGVENPRR; KHKIGLNNPRR; RHKLGINNPRR;
HRHLGVENPRR; KHKVGVENPRR; RHKIGLNNPRR; HHKLGINNPRR;
KHKLGVENPRR; RHKVGVENPRR; HHKIGLNNPRR; KKKLGINNPRR;
RHKLGVENPRR; HHKVGVENPRR; KKKIGLNNPRR; RKKLGINNPRR;
HHKLGVENPRR; KKKVGVENPRR; RKKIGLNNPRR; HKKLGINNPRR;
KKKLGVENPRR; RKKVGVENPRR; HKKIGLNNPRR; KRKLGINNPRR;
RKKLGVENPRR; HKKVGVENPRR; KRKIGLNNPRR; RRKLGINNPRR;
HKKLGVENPRR; KRKVGVENPRR; RRKIGLNNPRR; HRKLGINNPRR;
KRKLGVENPRR; RRKVGVEEPRR; HRKIGLNNPRR; KHRLGINNPRR;
RRKLGVENPRR; HRKVGVENPRR; KHRIGLNNPRR; RHRLGINNPRR;
HRKLGVENPRR; KHRVGVENPRR; RHRIGLNNPRR; HHRLGINNPRR;
KHRLGVENPRR; RHRVGVENPRR; HHRIGLNNPRR; KKRLGINNPRR;
RHRLGVENPRR; HHRVGVENPRR; KKRIGLNNPRR; RKRLGINNPRR;
HHRLGVENPRR; KKRVGVENPRR; RKRIGLNNPRR; HKRLGINNPRR;
KKRLGVENPRR; RKRVGVENPRR; HKRIGLNNPRR; KRRLGINNPRR;
RKRLGVENPRR; HKRVGVENPRR; KRRIGLNNPRR; RRRLGLNNPRR;
HKRLGVENPRR; KRRVGVENPRR; RRRIGLNNPRR; HRRLGINNPRR;
KRRLGVENPRR; RRRVGVENPRR; HRRIGLNNPRR; KHHIGIENPRR;
RRRLGVENPRR; HRRVGVENPRR; KHHVGLNNPRR; RHHIGINNPRR;
HRRLGVENPRR; KHHLGLNNPRR; RHHVGLNNPRR; HHHIGINNPRR;
KHHIGVENPRR; RHHLGLNNPRR; HHHVGLNNPRR; KKHIGINNPRR;
RHHIGVEEPRR; HHHLGLNNPRR; KKHVGLNNPRR; RKHIGINNPRR;
HHHIGVENPRR; KKHLGLNNPRR; RKHVGLNNPRR; HKHIGINNPRR;
KKHIGVENPRR; RKHLGLNNPRR; HKHVGLNNPRR; KRHIGINNPRR;
RKHIGVENPRR; HKHLGLNNPRR; KRHVGLNNPRR; RRHIGINNPRR;
HKHIGVENPRR; KRHLGLNNPRR; RRHVGLNNPRR; HRHIGINNPRR;
KRHIGVENPRR; RRHLGLNNPRR; HRHVGLNNPRR; KHKIGINNPRR;
RRHIGVENPRR; HRHLGLNNPRR; KHKVGLNNPRR; RHKIGINNPRR;
HRHIGVENPRR; KHKLGLNNPRR; RHKVGLNNPRR; HHKIGINNPRR;
KHKIGVENPRR; RHKLGLNNPRR; HHKVGLNNPRR; KKKIGINNPRR;
RHKIGVENPRR; HHKLGLNNPRR; KKKVGLNNPRR; RKKIGINNPRR;
HHKIGVENPRR; KKKLGLNNPRR; RKKVGLNNPRR; HKKIGINNPRR;
KRKIGINNPRR; RRKLGVNNPRR; HRKVGVNNPRR; KHRIGLEEPRH;
RRKIGINNPRR; HRKLGVNNPRR; KHRVGVNNPRR; RHRIGLEEPRH;
HRKIGINNPRR; KHRLGVNNPRR; RHRVGVNNPRR; HHRIGLEEPRH;
KHRIGINNPRR; RHRLGVNNPRR; HHRVGVNNPRR; KKRIGLEEPRH;
RHRIGINNPRR; HHRLGVNNPRR; KKRVGVNNPRR; RKRIGLEEPRH;
HHRIGINNPRR; KKRLGVNNPRR; RKRVGVNNPRR; HKRIGLEEPRH;
KKRIGINNPRR; RKRLGVNNPRR; HKRVGVNNPRR; KRRIGLEEPRH;
RKRIGINNPRR; HKRLGVNNPRR; KRRVGVNNPRR; RRRIGLEEPRH;
HKRIGINNPRR; KRRLGVNNPRR; RRRVGVNNPRR; HRRIGLEEPRH;
KRRIGINNPRR; RRRLGVNNPRR; HRRVGVNNPRR; KHHVGLEEPRH;
RRRIGINNPRR; HRRLGVNNPRR; KHHLGLEEPRH; RHHVGLEEPRH;
HRRIGINNPRR; KHHIGVNNPRR; RHHLGLEEPRH; HHHVGLEEPRH;
KHHVGINNPRR; RHHIGVNNPRR; HHHLGLEEPRH; KKHVGLEEPRH;
RHHVGINNPRR; HHHIGVNNPRR; KKHLGLEEPRH; RKHVGLEEPRH;
HHHVGINNPRR; KKHIGVNNPRR; RKHLGLEEPRH; HKHVGLEEPRH;
KKHVGINNPRR; RKHIGVNNPRR; HKHLGLEEPRH; KRHVGLEEPRH;
RKHVGINNPRR; HKHIGVNNPRR; KRHLGLEEPRH; RRHVGLEEPRH;
HKHVGINNPRR; KRHIGVNNPRR; RRHLGLEEPRH; HRHVGLEEPRH;
KRHVGINNPRR; RRHIGVNNPRR; HRHLGLEEPRH; KHKVGLEEPRH;
RRHVGINNPRR; HRHIGVNNPRR; KHKLGLEEPRH; RHKVGLEEPRH;
HRHVGINNPRR; KHKIGVNNPRR; RHKLGLEEPRH; HHKVGLEEPRH;
KHKVGINNPRR; RHKIGVNNPRR; HHKLGLEEPRH; KKKVGLEEPRH;
RHKVGINNPRR; HHKIGVNNPRR; KKKLGLEEPRH; RKKVGLEEPRH;
HHKVGINNPRR; KKKIGVNNPRR; RKKLGLEEPRH; HKKVGLEEPRH;
KKKVGINNPRR; RKKIGVNNPRR; HKKLGLEEPRH; KRKVGLEEPRH;
RKKVGINNPRR; HKKIGVNNPRR; KRKLGLEEPRH; RRKVGLEEPRH;
HKKVGINNPRR; KRKIGVNNPRR; RRKLGLEEPRH; HRKVGLEEPRH;
KRKVGINNPRR; RRKIGVNNPRR; HRKLGLEEPRH; KHRVGLEEPRH;
RRKVGINNPRR; HRKIGVNNPRR; KHRLGLEEPRH; RHRVGLEEPRH;
HRKVGINNPRR; KHRIGVNNPRR; RHRLGLEEPRH; HHRVGLEEPRH;
KHRVGINNPRR; RHRIGVNNPRR; HHRLGLEEPRH; KKRVGLEEPRH;
RHRVGINNPRR; HHRIGVNNPRR; KKRLGLEEPRH; RKRVGLEEPRH;
HHRVGINNPRR; KKRIGVNNPRR; RKRLGLEEPRH; HKRVGLEEPRH;
KKRVGINNPRR; RKRIGVNNPRR; HKRLGLEEPRH; KRRVGLEEPRH;
RKRVGINNPRR; HKRIGVNNPRR; KRRLGLEEPRH; RRRVGLEEPRH;
HKRVGINNPRR; KRRIGVNNPRR; RRRLGLEEPRH; HRRVGLEEPRH;
KRRVGINNPRR; RRRIGVNNPRR; HRRLGLEEPRH; KHHLGIEEPRH;
RRRVGINNPRR; HRRIGVNNPRR; KHHIGLEEPRH; RHHLGIEEPRH;
HRRVGINNPRR; KHHVGVNNPRR; RHHIGLEEPRH; HHHLGIEEPRH;
KHHLGVNNPRR; RHHVGVNNPRR; HHHIGLEEPRH; KKHLGIEEPRH;
RHHLGVNNPRR; HHHVGVNNPRR; KKHIGLEEPRH; RKHLGIEEPRH;
HHHLGVNNPRR; KKHVGVNNPRR; RKHIGLEEPRH; HKHLGIEEPRH;
KKHLGVNNPRR; RKHVGVNNPRR; HKHIGLEEPRH; KRHLGIEEPRH;
RKHLGVNNPRR; HKHVGVNNPRR; KRHIGLEEPRH; RRHLGIEEPRH;
HKHLGVNNPRR; KRHVGVNNPRR; RRHIGLEEPRH; HRHLGIEEPRH;
KRHLGVNNPRR; RRHVGVNNPRR; HRHIGLEEPRH; KHKLGIEEPRH;
RRHLGVNNPRR; HRHVGVNNPRR; KHKIGLEEPRH; RHKLGIEEPRH;
HRHLGVNNPRR; KHKVGVNNPRR; RHKIGLEEPRH; HHKLGIEEPRH;
KHKLGVNNPRR; RHKVGVNNPRR; HHKIGLEEPRH; KKKLGIEEPRH;
RHKLGVNNPRR; HHKVGVNNPRR; KKKIGLEEPRH; RKKLGIEEPRH;
HHKLGVNNPRR; KKKVGVNNPRR; RKKIGLEEPRH; HKKLGIEEPRH;
KKKLGVNNPRR; RKKVGVNNPRR; HKKIGLEEPRH; KRKLGIEEPRH;
RKKLGVNNPRR; HKKVGVNNPRR; KRKIGLEEPRH; RRKLGIEEPRH;
HKKLGVNNPRR; KRKVGVNNPRR; RRKIGLEEPRH; HRKLGIEEPRH;
KRKLGVNNPRR; RRKVGVNNPRR; HRKIGLEEPRH; KHRLGIEEPRH;
RHRLGIEEPRH; HHRVGIEEPRH; KKRIGVEEPRH; RKRLGLNEPRH;
HHRLGIEEPRH; KKRLGIEEPRH; RKRIGVEEPRH; HKRLGLNEPRH;
KKRLGIEEPRH; RKRVGIEEPRH; HKRIGVEEPRH; KRRLGLNEPRH;
RKRLGIEEPRH; HKRVGIEEPRH; KRRIGVEEPRH; RRRLGLNEPRH;
HKRLGIEEPRH; KRRVGIEEPRH; RRRIGVEEPRH; HRRLGLNEPRH;
KRRLGIEEPRH; RRRVGIEEPRH; HRRIGVEEPRH; KHHIGLNPRH;
RRRLGIEEPRH; HRRVGIEEPRH; KHHVGVEEPRH; RHHIGLNEPRH;
HRRLGIEEPRH; KKHLGVEEPRH; RHHVGVEEPRH; HHHIGLNEPRH;
KHHIGIEEPRH; RHHLGVEEPRH; HHHVGVEEPRH; KKHIGLNEPRH;
RHHIGIEEPRH; HHHLGVEEPRH; KKHVGVEEPRH; RKHIGLNEPRH;
HHHIGIEEPRH; KKHLGVEEPRH; RKHVGVEEPRH; HKHIGLNEPRH;
KKHIGIEEPRH; RKHLGVEEPRH; HKHVGVEEPRH; KRHIGLNEPRH;
RKHIGIEEPRH; HKHLGVEEPRH; KRHVGVEEPRH; RRHIGLNEPRH;
HKKIGIEEPRH; KRHLGVEEPRH; RRHVGVEEPRH; HRHIGLNEPRH;
KRHIGIEEPRH; RRHLGVEEPRH; HRHVGVEEPRH; KHKIGLNEPRH;
RRHIGIEEPRH; HRHLGVEEPRH; KHKVGVEEPRH; RHKIGLNEPRH;
HRHIGIEEPRH; KHKLGVEEPRH; RHKVGVEEPRH; HHKIGLNEPRH;
KHKIGIEEPRH; RHKLGVEEPRH; HHKVGVEEPRH; KKKIGLNEPRH;
RHKIGIEEPRH; HHKLGVEEPRH; KKKVGVEEPRH; RKKIGLNEPRH;
HHKIGIEEPRH; KKKLGVEEPRH; RKKVGVEEPRH; HKKIGLNEPRH;
KKKIGIEEPRH; RKKLGVEEPRH; HKKVGVEEPRH; KRKIGLNEPRH;
RKKIGIEEPRH; HKKLGVEEPRH; KRKVGVEEPRH; RRKIGLNEPRH;
HKKIGIEEPRH; KRKLGVEEPRH; RRKVGVEEPRH; HRKIGLNEPRH;
KRKIGIEEPRH; RRKLGVEEPRH; HRKVGVEEPRH; KHRIGLNEPRH;
RRKIGIEEPRH; HRKLGVEEPRH; KHRVGVEEPRH; RHRIGLNEPRH;
HRKIGIEEPRH; KHRLGVEEPRH; RHRVGVEEPRH; HHRIGLNEPRH;
KHRIGIEEPRH; RHRLGVEEPRH; HHRVGVEEPRH; KKRIGLNEPRH;
RHRIGIEEPRH; HHRLGVEEPRH; KKRVGVEEPRH; RKRIGLNEPRH;
HHRIGIEEPRH; KKRLGVEEPRH; RKRVGVEEPRH; HKRIGLNEPRH;
KKRIGIEEPRH; RKRLGVEEPRH; HKRVGVEEPRH; KRRIGLNEPRH;
RKRIGIEEPRH; HKRLGVEEPRH; KRRVGVEEPRH; RRRIGLNEPRH;
HKRIGIEEPRH; KRRLGVEEPRH; RRRVGVEEPRH; HRRIGLNEPRH;
KRRIGIEEPRH; RRRLGVEEPRH; HRRVGVEEPRH; KHHVGLNEPRH;
RRRIGIEEPRH; HRRLGVEEPRH; KHHLGLNEPRH; RHHVGLNEPRH;
HRRIGIEEPRH; KHHIGVEEPRH; RHHLGLNEPRH; HHHVGLNEPRH;
KHHVGIEEPRH; RHHIGVEEPRH; HHHLGLNEPRH; KKHVGLNEPRH;
RHHVGIEEPRH; HHHIGVEEPRH; KKHLGLNEPRH; RKHVGLNEPRH;
HHHVGIEEPRH; KKHIGVEEPRH; RKHLGLNEPRH; HKHVGLNEPRH;
KKHVGIEEPRH; RKHIGVEEPRH; HKHLGLNEPRH; KRHVGLNEPRH;
RKHVGIEEPRH; HKHIGVEEPRH; KRHLGLNEPRH; RRHVGLNEPRH;
HKHVGIEEPRH; KRHIGVEEPRH; RRHLGLNEPRH; HRHVGLNEPRH;
KRHVGIEEPRH; RRHIGVEEPRH; HRHLGLNEPRH; KHKVGLNEPRH;
RRHVGIEEPRH; HRHIGVEEPRH; KHKLGLNEPRH; RHKVGLNEPRH;
HRHVGIEEPRH; KHKIGVEEPRH; RHKLGLNEPRH; HHKVGLNEPRH;
KHKVGIEEPRH; RHKIGVEEPRH; HHKLGLNEPRH; KKKVGLNEPRH;
RHKVGIEEPRH; HHKIGVEEPRH; KKKLGLNEPRH; RKKVGLNEPRH;
HHKVGIEEPRH; KKKIGVEEPRH; RKKLGLNEPRH; HKKVGLNEPRH;
KKKVGIEEPRH; RKKIGVEEPRH; HKKLGLNEPRH; KRKVGLNEPRH;
RKKVGIEEPRH; HKKIGVEEPRH; KRKLGLNEPRH; RRKVGLNEPRH;
HKKVGIEEPRH; KRKIGVEEPRH; RRKLGLNEPRH; HRKVGLNEPRH;
KRKVGIEEPRH; RRKIGVEEPRH; HRKLGLNEPRH; KHRVGLNEPRH;
RRKVGIEEPRH; HRKIGVEEPRH; KHRLGLNEPRH; RHRVGLNEPRH;
HRKVGIEEPRH; KHRIGVEEPRH; RHRLGLNEPRH; HHRVGLNEPRH;
KHRVGIEEPRH; RHRIGVEEPRH; HHRLGLNEPRH; KKRVGLNEPRH;
RHRVGIEEPRH; HHRIGVEEPRH; KKRLGLNEPRH; RKRVGLNEPRH;
HKRVGLNEPRH; KRRIGINEPRH; RRRLGVNEPRH; HRRVGVNEPRH;
KRRVGLNEPRH; RRRIGINEPRH; HRRLGVNEPRH; KHHLGLENPRH;
RRRVGLNEPRH; HRRIGINEPRH; KHHIGVNEPRH; RHHLGLENPRH;
HRRVGLNEPRH; KHHVGINEPRH; RHHIGVNEPRH; HHHLGLENPRH;
KHHLGINEPRH; RHHVGINEPRH; HHHIGVNEPRH; KKHLGLENPRH;
RHHLGINEPRH; HHHVGINEPRH; KKHIGVNEPRH; RKHLGLENPRH;
HHHLGINEPRH; KKHVGINEPRH; RKHIGVNEPRH; HKHLGLENPRH;
KKHLGINEPRH; RKHVGINEPRH; HKHIGVNEPRH; KRHLGLENPRH;
RKHLGINEPRH; HKHVGINEPRH; KRHIGVNEPRH; RRHLGLENPRH;
HKHLGINEPRH; KRHVGINEPRH; RRHIGVNEPRH; HRHLGLENPRH;
KRHLGINEPRH; RRHVGINEPRH; HRHIGVNEPRH; KHKLGLENPRH;
RRHLGINEPRH; HRHVGINEPRH; KHKIGVNEPRH; RHKLGLENPRH;
HRHLGINEPRH; KHKVGINEPRH; RHKIGVNEPRH; HHKLGLENPRH;
KHKLGINEPRH; RHKVGINEPRH; HHKIGVNEPRH; KKKLGLENPRH;
RHKLGINEPRH; HHKVGINEPRH; KKKIGVNEPRH; RKKLGLENPRH;
HHKLGINEPRH; KKKVGINEPRH; RKKIGVNEPRH; HKKLGLENPRH;
KKKLGINEPRH; RKKVGINEPRH; HKKIGVNEPRH; KRKLGLENPRH;
RKKLGINEPRH; HKKVGINEPRH; KRKIGVNEPRH; RRKLGLENPRH;
HKKLGINEPRH; KRKVGINEPRH; RRKIGVNEPRH; HRKLGLENPRH;
KRKLGINEPRH; RRKVGINEPRH; HRKIGVNEPRH; KHRLGLENPRH;
RRKLGINEPRH; HRKVGINEPRH; KHRIGVNEPRH; RHRLGLENPRH;
HRKLGINEPRH; KHRVGINEPRH; RHRIGVNEPRH; HHRLGLENPRH;
KHRLGINEPRH; RHRVGINEPRH; HHRIGVNEPRH; KKRLGLENPRH;
RHRLGINEPRH; HHRVGINEPRH; KKRIGVNEPRH; RKRLGLENPRH;
HHRLGINEPRH; KKRVGINEPRH; RKRIGVNEPRH; HKRLGLENPRH;
KKRLGINEPRH; RKRVGINEPRH; HKRIGVNEPRH; KRRLGLENPRH;
RKRLGINEPRH; HKRVGINEPRH; KRRIGVNEPRH; RRRLGLENPRH;
HKRLGINEPRH; KRRVGINEPRH; RRRIGVNEPRH; HRRLGLENPRH;
KRRLGINEPRH; RRRVGINEPRH; HRRIGVNEPRH; KHHIGLENPRH;
RRRLGINEPRH; HRRVGINEPRH; KHHVGVNEPRH; RHHIGLENPRH;
HRRLGINEPRH; KHHLGVNEPRH; RHHVGVNEPRH; HHHIGLENPRH;
KHHIGIENPRH; RHHLGVNEPRH; HHHVGVNEPRH; KKHIGLENPRH;
RHHIGINEPRH; HHHLGVNEPRH; KKHVGVNEPRH; RKHIGLENPRH;
HHHIGINEPRH; KKHLGVNEPRH; RKHVGVNEPRH; HKHIGLENPRH;
KKHIGINEPRH; RKHLGVNEPRH; HKHVGVNEPRH; KRHIGLENPRH;
RKHIGINEPRH; HKHLGVNEPRH; KRHVGVNEPRH; RRHIGLENPRH;
HKHIGINEPRH; KRHLGVNEPRH; RRHVGVNEPRH; HRHIGLENPRH;
KRHIGINEPRH; RRHLGVNEPRH; HRHVGVNEPRH; KHKIGLENPRH;
RRHIGINEPRH; HRHLGVNEPRH; KHKVGVNEPRH; RHKIGLENPRH;
HRHIGINEPRH; KHKLGVNEPRH; RHKVGVNEPRH; HHKIGLENPRH;
KHKIGINEPRH; RHKLGVNEPRH; HHKVGVNEPRH; KKKIGLENPRH;
RHKIGINEPRH; HHKLGVNEPRH; KKKVGVNEPRH; RKKIGLENPRH;
HHKIGINEPRH; KKKLGVNEPRH; RKKVGVNEPRH; HKKIGLENPRH;
KKKIGINEPRH; RKKLGVNEPRH; HKKVGVNEPRH; KRKIGLENPRH;
RKKIGINEPRH; HKKLGVNEPRH; KRKVGVNEPRH; RRKIGLENPRH;
HKKIGINEPRH; KRKLGVNEPRH; RRKVGVNEPRH; HRKIGLENPRH;
KRKIGINEPRH; RRKLGVNEPRH; HRKVGVNEPRH; KHRIGLENPRH;
RRKIGINEPRH; HRKLGVNEPRH; KHRVGVNEPRH; RHRIGLENPRH;
HRKIGINEPRH; KHRLGVNEPRH; RHRVGVNEPRH; HHRIGLENPRH;
KHRIGINEPRH; RHRLGVNEPRH; HHRVGVNEPRH; KKRIGLENPRH;
RHRIGINEPRH; HHRLGVNEPRH; KKRVGVNEPRH; RKRIGLENPRH;
HHRIGINEPRH; KKRLGVNEPRH; RKRVGVNEPRH; HKRIGLENPRH;
KKRIGINEPRH; RKRLGVNEPRH; HKRVGVNEPRH; KRRIGLENPRH;
RKRIGINEPRH; HKRLGVNEPRH; KRRVGVNEPRH; RRRIGLENPRH;
HKRIGINEPRH; KRRLGVNEPRH; RRRVGVNEPRH; HRRIGLENPRH;
KHHVGLENPRH; RHHIGIENPRH; HHHLGVENPRH; KKHVGVENPRH;
RHHVGLENPRH; HHHIGIENPRH; KKHLGVENPRH; RKHVGVENPRH;
HHHVGLENPRH; KKHIGIENPRH; RKHLGVENPRH; HKHVGVENPRH;
KKHVGLENPRH; RKHIGIENPRH; HKHLGVENPRH; KRHVGVENPRH;
RKHVGLENPRH; HKHIGIENPRH; KRHLGVENPRH; RRHVGVENPRH;
HKHVGLENPRH; KRHIGIENPRH; RRHLGVENPRH; HRHVGVENPRH;
KRHVGLENPRH; RRHIGIENPRH; HRHLGVENPRH; KHKVGVENPRH;
RRHVGLENPRH; HRHIGIENPRH; KHKLGVENPRH; RHKVGVENPRH;
HRHVGLENPRH; KHKIGIENPRH; RHKLGVENPRH; HHKVGVENPRH;
KHKVGLENPRH; RHKIGIENPRH; HHKLGVENPRH; KKKVGVENPRH;
RHKVGLENPRH; HHKIGIENPRH; KKKLGVENPRH; RKKVGVENPRH;
HHKVGLENPRH; KKKIGIENPRH; RKKLGVENPRH; HKKVGVENPRH;
KKKVGLENPRH; RKKIGIENPRH; HKKLGVENPRH; KRKVGVENPRH;
RKKVGLENPRH; HKKIGIENPRH; KRKLGVENPRH; RRKVGVEEPRH;
HKKVGLENPRH; KRKIGIENPRH; RRKLGVENPRH; HRKVGVENPRH;
KRKVGLENPRH; RRKIGIENPRH; HRKLGVENPRH; KHRVGVENPRH;
RRKVGLENPRH; HRKIGIENPRH; KHRLGVENPRH; RHRVGVENPRH;
HRKVGLENPRH; KHRIGIENPRH; RHRLGVENPRH; HHRVGVENPRH;
KHRVGLENPRH; RHRIGIENPRH; HHRLGVENPRH; KKRVGVENPRH;
RHRVGLENPRH; HHRIGIENPRH; KKRLGVENPRH; RKRVGVENPRH;
HHRVGLENPRH; KKRIGIENPRH; RKRLGVENPRH; HKRVGVENPRH;
KKRVGLENPRH; RKRIGIENPRH; HKRLGVENPRH; KRRVGVENPRH;
RKRVGLENPRH; HKRIGIENPRH; KRRLGVENPRH; RRRVGVENPRH;
HKRVGLENPRH; KRRIGIENPRH; RRRLGVENPRH; HRRVGVENPRH;
KRRVGLENPRH; RRRIGIENPRH; HRRLGVENPRH; KHHLGLNNPRH;
RRRVGLENPRH; HRRIGIENPRH; KHHIGVENPRH; RHHLGLNNPRH;
HRRVGLENPRH; KHHVGIENPRH; RHHIGVEEPRH; HHHLGLNNPRH;
KHHLGIENPRH; RHHVGIENPRH; HHHIGVENPRH; KKHLGLNNPRH;
RHHLGIENPRH; HHHVGIENPRH; KKHIGVENPRH; RKHLGLNNPRH;
HHHLGIENPRH; KKHVGIENPRH; RKHIGVENPRH; HKHLGLNNPRH;
KKHLGIENPRH; RKHVGIENPRH; HKHIGVENPRH; KRHLGLNNPRH;
RKHLGIENPRH; HKHVGIENPRH; KRHIGVENPRH; RRHLGLNNPRH;
HKHLGIENPRH; KRHVGIENPRH; RRHIGVENPRH; HRHLGLNNPRH;
KRHLGIENPRH; RRHVGIENPRH; HRHIGVENPRH; KHKLGLNNPRH;
RRHLGIENPRH; HRHVGIENPRH; KHKIGVENPRH; RHKLGLNNPRH;
HRHLGIENPRH; KHKVGIENPRH; RHKIGVENPRH; HHKLGLNNPRH;
KHKLGIENPRH; RHKVGIENPRH; HHKIGVENPRH; KKKLGLNNPRH;
RHKLGIENPRH; HHKVGIENPRH; KKKIGVENPRH; RKKLGLNNPRH;
HHKLGIENPRH; KKKVGIENPRH; RKKIGVENPRH; HKKLGLNNPRH;
KKKLGIENPRH; RKKVGIENPRH; HKKIGVENPRH; KRKLGLNNPRH;
RKKLGIENPRH; HKKVGIENPRH; KRKIGVENPRH; RRKLGLNNPRH;
HKKLGIENPRH; KRKVGIENPRH; RRKIGVENPRH; HRKLGLNNPRH;
KRKLGIENPRH; RRKVGIENPRH; HRKIGVENPRH; KHRLGLNNPRH;
RRKLGIENPRH; HRKVGIENPRH; KHRIGVENPRH; RHRLGLNNPRH;
HRKLGIENPRH; KHRVGIENPRH; RHRIGVENPRH; HHRLGLNNPRH;
KHRLGIENPRH; RHRVGIENPRH; HHRIGVENPRH; KKRLGLNNPRH;
RHRLGIENPRH; HHRVGIENPRH; KKRIGVENPRH; RKRLGLNNPRH;
HHRLGIENPRH; KKRVGIENPRH; RKRIGVENPRH; HKRLGLNNPRH;
KKRLGIENPRH; RKRVGIENPRH; HKRIGVENPRH; KRRLGLNNPRH;
RKRLGIENPRH; HKRVGIENPRH; KRRIGVENPRH; RRRLGLNNPRH;
HKRLGIENPRH; KRRVGIENPRH; RRRIGVENPRH; HRRLGLNNPRH;
KRRLGIENPRH; RRRVGIENPRH; HRRIGVENPRH; KHHIGLNNPRH;
RRRLGIENPRH; HRRVGIENPRH; KHHVGVENPRH; RHHIGLNNPRH;
HRRLGIENPRH; KHHLGVENPRH; RHHVGVENPRH; HHHIGLNNPRH;
KHHIGIENPRH; RHHLGVENPRH; HHHVGVENPRH; KKHIGLNNPRH;
RKHIGLNNPRH; HKHLGINNPRH; KRHVGINNPRH; RRHIGVNNPRH;
HKHIGLNNPRH; KRHLGINNPRH; RRHVGINNPRH; HRHIGVNNPRH;
KRHIGLNNPRH; RRHLGINNPRH; HRHVGINNPRH; KHKIGVNNPRH;
RRHIGLNNPRH; HRHLGINNPRH; KHKVGINNPRH; RHKIGVNNPRH;
HRHIGLNNPRH; KHKLGINNPRH; RHKVGINNPRH; HHKIGVNNPRH;
KHKIGLNNPRH; RHKLGINNPRH; HHKVGINNPRH; KKKIGVNNPRH;
RHKIGLNNPRH; HHKLGINNPRH; KKKVGINNPRH; RKKIGVNNPRH;
HHKIGLNNPRH; KKKLGINNPRH; RKKVGINNPRH; HKKIGVNNPRH;
KKKIGLNNPRH; RKKLGINNPRH; HKKVGINNPRH; KRKIGVNNPRH;
RKKIGLNNPRH; HKKLGINNPRH; KRKVGINNPRH; RRKIGVNNPRH;
HKKIGLNNPRH; KRKLGINNPRH; RRKVGINNPRH; HRKIGVNNPRH;
KRKIGLNNPRH; RRKLGINNPRH; HRKVGINNPRH; KHRIGVNNPRH;
RRKIGLNNPRH; HRKLGINNPRH; KHRVGINNPRH; RHRIGVNNPRH;
HRKIGLNNPRH; KHRLGINNPRH; RHRVGINNPRH; HHRIGVNNPRH;
KHRIGLNNPRH; RHRLGINNPRH; HHRVGINNPRH; KKRIGVNNPRH;
RHRIGLNNPRH; HHRLGINNPRH; KKRVGINNPRH; RKRIGVNNPRH;
HHRIGLNNPRH; KKRLGINNPRH; RKRVGINNPRH; HKRIGVNNPRH;
KKRIGLNNPRH; RKRLGINNPRH; HKRVGINNPRH; KRRIGVNNPRH;
RKRIGLNNPRH; HKRLGINNPRH; KRRVGINNPRH; RRRIGVNNPRH;
HKRIGLNNPRH; KRRLGINNPRH; RRRVGINNPRH; HRRIGVNNPRH;
KRRIGLNNPRH; RRRLGINNPRH; HRRVGINNPRH; KHHVGVNNPRH;
RRRIGLNNPRH; HRRLGINNPRH; KHHLGVNNPRH; RHHVGVNNPRH;
HRRIGLNNPRH; KHHIGIENPRH; RHHLGVNNPRH; HHHVGVNNPRH;
KHHVGLNNPRH; RHHIGINNPRH; HHHLGVNNPRH; KKHVGVNNPRH;
RHHVGLNNPRH; HHHIGINNPRH; KKHLGVNNPRH; RKHVGVNNPRH;
HHHVGLNNPRH; KKHIGINNPRH; RKHLGVNNPRH; HKHVGVNNPRH;
KKHVGLNNPRH; RKHIGINNPRH; HKHLGVNNPRH; KRHVGVNNPRH;
RKHVGLNNPRH; HKHIGINNPRH; KRHLGVNNPRH; RRHVGVNNPRH;
HKHVGLNNPRH; KRHIGINNPRH; RRHLGVNNPRH; HRHVGVNNPRH;
KRHVGLNNPRH; RRHIGINNPRH; HRHLGVNNPRH; KHKVGVNNPRH;
RRHVGLNNPRH; HRHIGINNPRH; KHKLGVNNPRH; RHKVGVNNPRH;
HRHVGLNNPRH; KHKIGINNPRH; RHKLGVNNPRH; HHKVGVNNPRH;
KHKVGLNNPRH; RHKIGINNPRH; HHKLGVNNPRH; KKKVGVNNPRH;
RHKVGLNNPRH; HHKIGINNPRH; KKKLGVNNPRH; RKKVGVNNPRH;
HHKVGLNNPRH; KKKIGINNPRH; RKKLGVNNPRH; HKKVGVNNPRH;
KKKVGLNNPRH; RKKIGINNPRH; HKKLGVNNPRH; KRKVGVNNPRH;
RKKVGLNNPRH; HKKIGINNPRH; KRKVGVNNPRH; RRKVGVNNPRH;
HKKVGLNNPRH; KRKIGINNPRH; RRKLGVNNPRH; HRKVGVNNPRH;
KRKVGLNNPRH; RRKIGINNPRH; HRKLGVNNPRH; KHRVGVNNPRH;
RRKVGLNNPRH; HRKIGINNPRH; KHRLGVNNPRH; RHRVGVNNPRH;
HRKVGLNNPRH; KHRIGINNPRH; RHRLGVNNPRH; HHRVGVNNPRH;
KHRVGLNNPRH; RHRIGINNPRH; HHRLGVNNPRH; KKRVGVNNPRH;
RHRVGLNNPRH; HHRIGINNPRH; KKRLGVNNPRH; RKRVGVNNPRH;
HHRVGLNNPRH; KKRIGINNPRH; RKRLGVNNPRH; HKRVGVNNPRH;
KKRVGLNNPRH; RKRIGINNPRH; HKRLGVNNPRH; KRRVGVNNPRH;
RKRVGLNNPRH; HKRIGINNPRH; KRRLGVNNPRH; RRRVGVNNPRH;
HKRVGLNNPRH; KRRIGINNPRH; RRRLGVNNPRH; HRRVGVNNPRH;
KRRVGLNNPRH; RRRIGINNPRH; HRRLGVNNPRH; KHHLGLEEPHR;
RRRVGLNNPRH; HRRIGINNPRH; KHHIGVNNPRH; RHHLGLEEPHR;
HRRVGLNNPRH; KHHVGINNPRH; RHHIGVNNPRH; HHHLGLEEPHR;
KHHLGINNPRH; RHHVGINNPRH; HHHIGVNNPRH; KKHLGLEEPHR;
RHHLGINNPRH; HHHVGINNPRH; KKHIGVNNPRH; RKHLGLEEPHR;
HHHLGINNPRH; KKHVGINNPRH; RKHIGVNNPRH; HKHLGLEEPHR;
KKHLGINNPRH; RKHVGINNPRH; HKHIGVNNPRH; KRHLGLEEPHR;
RKHLGINNPRH; HKHVGINNPRH; KRHIGVNNPRH; RRHLGLEEPHR;
HRHLGLEEPHR; KHKVGLEEPHR; RHKIGIEEPHR; HHKLGVEEPHR;
KHKLGLEEPHR; RHKVGLEEPHR; HHKIGIEEPHR; KKKLGVEEPHR;
RHKLGLEEPHR; HHKVGLEEPHR; KKKIGIEEPHR; RKKLGVEEPHR;
HHKLGLEEPHR; KKKVGLEEPHR; RKKIGIEEPHR; HKKLGVEEPHR;
KKKLGLEEPHR; RKKVGLEEPHR; HKKIGIEEPHR; KRKLGVEEPHR;
RKKLGLEEPHR; HKKVGLEEPHR; KRKIGIEEPHR; RRKLGVEEPHR;
HKKLGLEEPHR; KRKVGLEEPHR; RRKIGIEEPHR; HRKLGVEEPHR;
KRKLGLEEPHR; RRKVGLEEPHR; HRKIGIEEPHR; KHRLGVEEPHR;
RRKLGLEEPHR; HRKVGLEEPHR; KHRIGIEEPHR; RHRLGVEEPHR;
HRKLGLEEPHR; KHRVGLEEPHR; RHRIGIEEPHR; HHRLGVEEPHR;
KHRLGLEEPHR; RHRVGLEEPHR; HHRIGIEEPHR; KKRLGVEEPHR;
RHRLGLEEPHR; HHRVGLEEPHR; KKRIGIEEPHR; RKRLGVEEPHR;
HHRLGLEEPHR; KKRVGLEEPHR; RKRIGIEEPHR; HKRLGVEEPHR;
KKRLGLEEPHR; RKRVGLEEPHR; HKRIGIEEPHR; KRRLGVEEPHR;
RKRLGLEEPHR; HKRVGLEEPHR; KRRIGIEEPHR; RRRLGVEEPHR;
HKRLGLEEPHR; KRRVGLEEPHR; RRRIGIEEPHR; HRRLGVEEPHR;
KRRLGLEEPHR; RRRVGLEEPHR; HRRIGIEEPHR; KHHIGVEEPHR;
RRRLGLEEPHR; HRRVGLEEPHR; KHHVGIEEPHR; RHHIGVEEPHR;
HRRLGLEEPHR; KHHLGIEEPHR; RHHVGIEEPHR; HHHIGVEEPHR;
KHHIGLEEPHR; RHHLGIEEPHR; HHHVGIEEPHR; KKHIGVEEPHR;
RHHIGLEEPHR; HHHLGIEEPHR; KKHVGIEEPHR; RKHIGVEEPHR;
HHHIGLEEPHR; KKHLGIEEPHR; RKHVGIEEPHR; HKHIGVEEPHR;
KKHIGLEEPHR; RKHLGIEEPHR; HKHVGIEEPHR; KRHIGVEEPHR;
RKHIGLEEPHR; HKHLGIEEPHR; KRHVGIEEPHR; RRHIGVEEPHR;
HKHIGLEEPHR; KRHLGIEEPHR; RRHVGIEEPHR; HRHIGVEEPHR;
KRHIGLEEPHR; RRHLGIEEPHR; HRHVGIEEPHR; KHKIGVEEPHR;
RRHIGLEEPHR; HRHLGIEEPHR; KHKVGIEEPHR; RHKIGVEEPHR;
HRHIGLEEPHR; KHKLGIEEPHR; RHKVGIEEPHR; HHKIGVEEPHR;
KHKIGLEEPHR; RHKLGIEEPHR; HHKVGIEEPHR; KKKIGVEEPHR;
RHKIGLEEPHR; HHKLGIEEPHR; KKKVGIEEPHR; RKKIGVEEPHR;
HHKIGLEEPHR; KKKLGIEEPHR; RKKVGIEEPHR; HKKIGVEEPHR;
KKKIGLEEPHR; RKKLGIEEPHR; HKKVGIEEPHR; KRKIGVEEPHR;
RKKIGLEEPHR; HKKLGIEEPHR; KRKVGIEEPHR; RRKIGVEEPHR;
HHKIGLEEPHR; KRKLGIEEPHR; RRKVGIEEPHR; HRKIGVEEPHR;
KRKIGLEEPHR; RRKLGIEEPHR; HRKVGIEEPHR; KHRIGVEEPHR;
RRKIGLEEPHR; HRKLGIEEPHR; KHRVGIEEPHR; RHRIGVEEPHR;
HRKIGLEEPHR; KHRLGIEEPHR; RHRVGIEEPHR; HHRIGVEEPHR;
KHRIGLEEPHR; RHRLGIEEPHR; HHRVGIEEPHR; KKRIGVEEPHR;
RHRIGLEEPHR; HHRLGIEEPHR; KKRVGIEEPHR; RKRIGVEEPHR;
HHRIGLEEPHR; KKRLGIEEPHR; RKRVGIEEPHR; HKRIGVEEPHR;
KKRIGLEEPHR; RKRLGIEEPHR; HKRVGIEEPHR; KRRIGVEEPHR;
RKRIGLEEPHR; HKRLGIEEPHR; KRRVGLEEPHR; RRRIGVEEPHR;
HKRIGLEEPHR; KRRLGIEEPHR; RRRVGIEEPHR; HRRIGVEEPHR;
KRRIGLEEPHR; RRRLGVEEPHR; HRRVGLEEPHR; KHHVGVEEPHR;
RRRIGLEEPHR; HRRLGLEEPHR; KHHLGVEEPHR; RHHVGVEEPHR;
HRRIGLEEPHR; KHHIGIEEPHR; RHHLGVEEPHR; HHHVGVEEPHR;
KHHVGLEEPHR; RHHIGIEEPHR; HHHLGVEEPHR; KKHVGVEEPHR;
RHHVGLEEPHR; HHHIGIEEPHR; KKHLGVEEPHR; RKHVGVEEPHR;
HHHVGLEEPHR; KKHIGIEEPHR; RKHLGVEEPHR; HKHVGVEEPHR;
KKHVGLEEPHR; RKHIGIEEPHR; HKHLGVEEPHR; KRHVGVEEPHR;
RKHVGLEEPHR; HKHIGIEEPHR; KRHLGVEEPHR; RRHVGVEEPHR;
HKHVGLEEPHR; KRHIGIEEPHR; RRHLGVEEPHR; HRHVGVEEPHR;
KRHVGLEEPHR; RRHIGIEEPHR; HRHLGVEEPHR; KHKVGVEEPHR;
RRHVGLEEPHR; HRHIGIEEPHR; KHKLGVEEPHR; RHKVGVEEPHR;
HRHVGLEEPHR; KHKIGIEEPHR; RHKLGVEEPHR; HHKVGVEEPHR;
KKKVGVEEPHR; RKKIGLNEPHR; HKKLGINEPHR; KRKVGINEPHR;
RKKVGVEEPHR; HKKIGLNEPHR; KRKLGINEPHR; RRKVGINEPHR;
HKKVGVEEPHR; KRKIGLNEPHR; RRKLGINEPHR; HRKVGINEPHR;
KRKVGVEEPHR; RRKIGLNEPHR; HRKLGINEPHR; KHRVGINEPHR;
RRKVGVEEPHR; HRKIGLNEPHR; KHRLGINEPHR; RHRVGINEPHR;
HRKVGVEEPHR; KHRIGLNEPHR; RHRLGINEPHR; HHRVGINEPHR;
KHRVGVEEPHR; RHRIGLNEPHR; HHRLGINEPHR; KKRVGINEPHR;
RHRVGVEEPHR; HHRIGLNEPHR; KKRLGINEPHR; RKRVGINEPHR;
HHRVGVEEPHR; KKRIGLNEPHR; RKRLGINEPHR; HKRVGINEPHR;
KKRVGVEEPHR; RKRIGLNEPHR; HKRLGINEPHR; KRRVGINEPHR;
RKRVGVEEPHR; HKRIGLNEPHR; KRRLGINEPHR; RRRVGINEPHR;
HKRVGVEEPHR; KRRIGLNEPHR; RRRLGINEPHR; HRRVGINEPHR;
KRRVGVEEPHR; RRRIGLNEPHR; HRRLGINEPHR; KHHLGVNEPHR;
RRRVGVEEPHR; HRRIGLNEPHR; KHHIGIENPHR; RHHLGVNEPHR;
HRRVGVEEPHR; KHHLGLNEPHR; RHHIGINEPHR; HHHLGVNEPHR;
KHHLGLNEPHR; RHHVGLNEPHR; HHHIGINEPHR; KKHLGVNEPHR;
RHHLGLNEPHR; HHHVGLNEPHR; KKHIGINEPHR; RKHLGVNEPHR;
HHHLGLNEPHR; KKHLGLNEPHR; RKHIGINEPHR; HKHLGVNEPHR;
KKHLGLNEPHR; RKHVGLNEPHR; HKHIGINEPHR; KRHLGVNEPHR;
RKHLGLNEPHR; HKHVGLNEPHR; KRHIGINEPHR; RRHLGVNEPHR;
HKHLGLNEPHR; KRHVGLNEPHR; RRHIGINEPHR; HRHLGVNEPHR;
KRHLGLNEPHR; RRHVGLNEPHR; HRHIGINEPHR; KHKLGVNEPHR;
RRHLGLNEPHR; HRHVGLNEPHR; KHKIGINEPHR; RHKLGVNEPHR;
HRHLGLNEPHR; KHKVGLNEPHR; RHKIGINEPHR; HHKLGVNEPHR;
KHKLGLNEPHR; RHKVGLNEPHR; HHKIGINEPHR; KKKLGVNEPHR;
RHKLGLNEPHR; HHKVGLNEPHR; KKKIGINEPHR; RKKLGVNEPHR;
HHKLGLNEPHR; KKKVGLNEPHR; RKKIGINEPHR; HKKLGVNEPHR;
KKKLGLNEPHR; RKKVGLNEPHR; HKKIGINEPHR; KRKLGVNEPHR;
RKKLGLNEPHR; HKKVGLNEPHR; KRKIGINEPHR; RRKLGVNEPHR;
HKKLGLNEPHR; KRKVGLNEPHR; RRKIGINEPHR; HRKLGVNEPHR;
KRKLGLNEPHR; RRKVGLNEPHR; HRKIGINEPHR; KHRLGVNEPHR;
RRKLGLNEPHR; HRKVGLNEPHR; KHRIGINEPHR; RHRLGVNEPHR;
HRKLGLNEPHR; KHRVGLNEPHR; RHRIGINEPHR; HHRLGVNEPHR;
KHRLGLNEPHR; RHRVGLNEPHR; HHRIGINEPHR; KKRLGVNEPHR;
RHRLGLNEPHR; HHRVGLNEPHR; KKRIGINEPHR; RKRLGVNEPHR;
HHRLGLNEPHR; KKRVGLNEPHR; RKRIGINEPHR; HKRLGVNEPHR;
KKRLGLNEPHR; RKRVGLNEPHR; HKRIGINEPHR; KRRLGVNEPHR;
RKRLGLNEPHR; HKRVGLNEPHR; KRRIGINEPHR; RRRLGVNEPHR;
HKRLGLNEPHR; KRRVGLNEPHR; RRRIGINEPHR; HRRLGVNEPHR;
KRRLGLNEPHR; RRRVGLNEPHR; HRRIGINEPHR; KHHIGVNEPHR;
RRRLGLNEPHR; HRRVGLNEPHR; KHHVGINEPHR; RHHIGVNEPHR;
HRRLGLNEPHR; KHHLGLNEPHR; RHHVGINEPHR; HHHIGVNEPHR;
KHHIGLNPHR; RHHLGINEPHR; HHHVGINEPHR; KKHIGVNEPHR;
RHHIGLNEPHR; HHHLGINEPHR; KKHVGINEPHR; RKHIGVNEPHR;
HHHIGLNEPHR; KKHLGINEPHR; RKHVGINEPHR; HKHIGVNEPHR;
KKHIGLNEPHR; RKHLGINEPHR; HKHVGINEPHR; KRHIGVNEPHR;
RKHIGLNEPHR; HKHLGINEPHR; KRHVGINEPHR; RRHIGVNEPHR;
HKHIGLNEPHR; KRHLGINEPHR; RRHVGINEPHR; HRHIGVNEPHR;
KRHIGLNEPHR; RRHLGINEPHR; HRHVGINEPHR; KHKIGVNEPHR;
RRHIGLNEPHR; HRHLGINEPHR; KHKVGINEPHR; RHKIGVNEPHR;
HRHIGLNEPHR; KHKLGINEPHR; RHKVGINEPHR; HHKIGVNEPHR;
KHKIGLNEPHR; RHKLGINEPHR; HHKVGINEPHR; KKKIGVNEPHR;
RHKIGLNEPHR; HHKLGINEPHR; KKKVGINEPHR; RKKIGVNEPHR;
HHKIGLNEPHR; KKKLGINEPHR; RKKVGINEPHR; HKKIGVNEPHR;
KKKIGLNEPHR; RKKLGINEPHR; HKKVGINEPHR; KRKIGVNEPHR;
RRKIGVNEPHR; HRKLGLENPHR; KHRVGLENPHR; RHRIGIENPHR;
HRKIGVNEPHR; KHRLGLENPHR; RHRVGLENPHR; HHRIGIENPHR;
KHRIGVNEPHR; RHRLGLENPHR; HHRVGLENPHR; KKRIGIENPHR;
RHRIGVNEPHR; HHRLGLENPHR; KKRVGLENPHR; RKRIGIENPHR;
HHRIGVNEPHR; KKRLGLENPHR; RKRVGLENPHR; HKRIGIENPHR;
KKRIGVNEPHR; RKRLGLENPHR; HKRVGLENPHR; KRRIGIENPHR;
RKRIGVNEPHR; HKRLGLENPHR; KRRVGLENPHR; RRRIGIENPHR;
HKRIGVNEPHR; KRRLGLENPHR; RRRVGLENPHR; HRRIGIENPHR;
KRRIGVNEPHR; RRRLGLENPHR; HRRVGLENPHR; KHHVGIENPHR;
RRRIGVNEPHR; HRRLGLENPHR; KHHLGIENPHR; RHHVGIENPHR;
HRRIGVNEPHR; KHHIGLENPHR; RHHLGIENPHR; HHHVGIENPHR;
KHHVGVNEPHR; RHHIGLENPHR; HHHLGIENPHR; KKHVGIENPHR;
RHHVGVNEPHR; HHHIGLENPHR; KKHLGIENPHR; RKHVGIENPHR;
HHHVGVNEPHR; KKHIGLENPHR; RKHLGIENPHR; HKHVGIENPHR;
KKHVGVNEPHR; RKHIGLENPHR; HKHLGIENPHR; KRHVGIENPHR;
RKHVGVNEPHR; HKHIGLENPHR; KRHLGIENPHR; RRHVGIENPHR;
HKHVGVNEPHR; KRHIGLENPHR; RRHLGIENPHR; HRHVGIENPHR;
KRHVGVNEPHR; RRHIGLENPHR; HRHLGIENPHR; KHKVGIENPHR;
RRHVGVNEPHR; HRHIGLENPHR; KHKLGIENPHR; RHKVGIENPHR;
HRHVGVNEPHR; KHKIGLENPHR; RHKLGIENPHR; HHKVGIENPHR;
KHKVGVNEPHR; RHKIGLENPHR; HHKLGIENPHR; KKKVGIENPHR;
RHKVGVNEPHR; HHKIGLENPHR; KKKLGIENPHR; RKKVGIENPHR;
HHKVGVNEPHR; KKKIGLENPHR; RKKLGIENPHR; HKKVGIENPHR;
KKKVGVNEPHR; RKKIGLENPHR; HKKLGIENPHR; KRKVGIENPHR;
RKKVGVNEPHR; HKKIGLENPHR; KRKLGIENPHR; RRKVGIENPHR;
HKKVGVNEPHR; KRKIGLENPHR; RRKLGIENPHR; HRKVGIENPHR;
KRKVGVNEPHR; RRKIGLENPHR; HRKLGIENPHR; KHRVGIENPHR;
RRKVGVNEPHR; HRKIGLENPHR; KHRLGIENPHR; RHRVGIENPHR;
HRKVGVNEPHR; KHRIGLENPHR; RHRLGIENPHR; HHRVGIENPHR;
KHRVGVNEPHR; RHRIGLENPHR; HHRLGIENPHR; KKRVGIENPHR;
RHRVGVNEPHR; HHRIGLENPHR; KKRLGIENPHR; RKRVGIENPHR;
HHRVGVNEPHR; KKRIGLENPHR; RKRLGIENPHR; HKRVGIENPHR;
KKRVGVNEPHR; RKRIGLENPHR; HKRLGIENPHR; KRRVGIENPHR;
RKRVGVNEPHR; HKRIGLENPHR; KRRLGIENPHR; RRRVGIENPHR;
HKRVGVNEPHR; KRRIGLENPHR; RRRLGIENPHR; HRRVGIENPHR;
KRRVGVNEPHR; RRRIGLENPHR; HRRLGIENPHR; KHHLGVENPHR;
RRRVGVNEPHR; HRRIGLENPHR; KHHIGIENPHR; RHHLGVENPHR;
HRRVGVNEPHR; KHHVGLENPHR; RHHIGIENPHR; HHHLGVENPHR;
KHHLGLENPHR; RHHVGLENPHR; HHHIGIENPHR; KKHLGVENPHR;
RHHLGLENPHR; HHHVGLENPHR; KKHIGIENPHR; RKHLGVENPHR;
HHHLGLENPHR; KKHVGLENPHR; RKHIGIENPHR; HKHLGVENPHR;
KKHLGLENPHR; RKHVGLENPHR; HKHIGIENPHR; KRHLGVENPHR;
RKHLGLENPHR; HKHVGLENPHR; KRHIGIENPHR; RRHLGVENPHR;
HKHLGLENPHR; KRHVGLENPHR; RRHIGIENPHR; HRHLGVENPHR;
KRHLGLENPHR; RRHVGLENPHR; HRHIGIENPHR; KHKLGVENPHR;
RRHLGLENPHR; HRHVGLENPHR; KHKIGIENPHR; RHKLGVENPHR;
HRHLGLENPHR; KHKVGLENPHR; RHKIGIENPHR; HHKLGVENPHR;
KHKLGLENPHR; RHKVGLENPHR; HHKIGIENPHR; KKKLGVENPHR;
RHKLGLENPHR; HHKVGLENPHR; KKKIGIENPHR; RKKLGVENPHR;
HHKLGLENPHR; KKKVGLENPHR; RKKIGIENPHR; HKKLGVENPHR;
KKKLGLENPHR; RKKVGLENPHR; HKKIGIENPHR; KRKLGVENPHR;
RKKLGLENPHR; HKKVGLENPHR; KRKIGIENPHR; RRKLGVENPHR;
HKKLGLENPHR; KRKVGLENPHR; RRKIGIENPHR; HRKLGVENPHR;
KRKLGLENPHR; RRKVGLENPHR; HRKIGIENPHR; KHRLGVENPHR;
RRKLGLENPHR; HRKVGLENPHR; KHRIGIENPHR; RHRLGVENPHR;
HHRLGVENPHR; KKRVGVENPHR; RKRIGLNNPHR; HKRLGINNPHR;
KKRLGVENPHR; RKRVGVENPHR; HKRIGLNNPHR; KRRLGINNPHR;
RKRLGVENPHR; HKRVGVENPHR; KRRIGLNNPHR; RRRLGINNPHR;
HKRLGVENPHR; KRRVGVENPHR; RRRIGLNNPHR; HRRLGINNPHR;
KRRLGVENPHR; RRRVGVENPHR; HRRIGLNNPHR; KHHIGIENPHR;
RRRLGVENPHR; HRRVGVENPHR; KHHVGLNNPHR; RHHIGINNPHR;
HRRLGVENPHR; KHHLGLNNPHR; RHHVGLNNPHR; HHHIGINNPHR;
KHHIGVENPHR; RHHLGLNNPHR; HHHVGLNNPHR; KKHIGINNPHR;
RHHIGVEEPHR; HHHLGLNNPHR; KKHVGLNNPHR; RKHIGINNPHR;
HHHIGVENPHR; KKHLGLNNPHR; RKHVGLNNPHR; HKHIGINNPHR;
KKHIGVENPHR; RKHLGLNNPHR; HKHVGLNNPHR; KRHIGINNPHR;
RKHIGVENPHR; HKHLGLNNPHR; KRHVGLNNPHR; RRHIGINNPHR;
HKRIGVENPHR; KRHLGLNNPHR; RRHVGLNNPHR; HRHIGINNPHR;
KRHIGVENPHR; RRHLGLNNPHR; HRHVGLNNPHR; KHKIGINNPHR;
RRHIGVENPHR; HRHLGLNNPHR; KHKVGLNNPHR; RHKIGINNPHR;
HRHIGVENPHR; KHKLGLNNPHR; RHKVGLNNPHR; HHKIGINNPHR;
KHKIGVENPHR; RHKLGLNNPHR; HHKVGLNNPHR; KKKIGINNPHR;
RHKIGVENPHR; HHKLGLNNPHR; KKKVGLNNPHR; RKKIGINNPHR;
HHKIGVENPHR; KKKLGLNNPHR; RKKVGLNNPHR; HKKIGINNPHR;
KKKIGVENPHR; RKKLGLNNPHR; HKKVGLNNPHR; KRKIGINNPHR;
RKKIGVENPHR; HKKLGLNNPHR; KRKVGLNNPHR; RRKIGINNPHR;
HKKIGVENPHR; KRKLGLNNPHR; RRKVGLNNPHR; HRKIGINNPHR;
KRKIGVENPHR; RRKLGLNNPHR; HRKVGLNNPHR; KHRIGINNPHR;
RRKIGVENPHR; HRKLGLNNPHR; KHRVGLNNPHR; RHRIGINNPHR;
HRKIGVENPHR; KHRLGLNNPHR; RHRVGLNNPHR; HHRIGINNPHR;
KHRIGVENPHR; RHRLGLNNPHR; HHRVGLNNPHR; KKRIGINNPHR;
RHRIGVENPHR; HHRLGLNNPHR; KKRVGLNNPHR; RKRIGINNPHR;
HHRIGVENPHR; KKRLGLNNPHR; RKRVGLNNPHR; HKRIGINNPHR;
KKRIGVENPHR; RKRLGLNNPHR; HKRVGLNNPHR; KRRIGINNPHR;
RKRIGVENPHR; HKRLGLNNPHR; KRRVGLNNPHR; RRRIGINNPHR;
HKRIGVENPHR; KRRLGLNNPHR; RRRVGLNNPHR; HRRIGINNPHR;
KRRIGVENPHR; RRRLGLNNPHR; HRRVGLNNPHR; KHHVGINNPHR;
RRRIGVENPHR; HRRLGLNNPHR; KHHLGINNPHR; RHHVGINNPHR;
HRRIGVENPHR; KHHIGLNNPHR; RHHLGINNPHR; HHHVGINNPHR;
KHHVGVENPHR; RHHIGLNNPHR; HHHLGINNPHR; KKHVGINNPHR;
RHHVGVENPHR; HHHIGLNNPHR; KKHLGINNPHR; RKHVGINNPHR;
HHHVGVENPHR; KKHIGLNNPHR; RKHLGINNPHR; HKHVGINNPHR;
KKHVGVENPHR; RKHIGLNNPHR; HKHLGINNPHR; KRHVGINNPHR;
RKHVGVENPHR; HKHIGLNNPHR; KRHLGINNPHR; RRHVGINNPHR;
HKHVGVENPHR; KRHIGLNNPHR; RRHLGINNPHR; HRHVGINNPHR;
KRHVGVENPHR; RRHIGLNNPHR; HRHLGINNPHR; KHKVGINNPHR;
RRHVGVENPHR; HRHIGLNNPHR; KHKLGINNPHR; RHKVGINNPHR;
HRHVGVENPHR; KHKIGLNNPHR; RHKLGINNPHR; HHKVGINNPHR;
KHKVGVENPHR; RHKIGLNNPHR; HHKLGINNPHR; KKKVGINNPHR;
RHKVGVENPHR; HHKIGLNNPHR; KKKLGINNPHR; RKKVGINNPHR;
HHKVGVENPHR; KKKIGLNNPHR; RKKLGINNPHR; HKKVGINNPHR;
KKKVGVENPHR; RKKIGLNNPHR; HKKLGINNPHR; KRKVGINNPHR;
RKKVGVENPHR; HKKIGLNNPHR; KRKLGINNPHR; RRKVGINNPHR;
HKKVGVENPHR; KRKIGLNNPHR; RRKLGINNPHR; HRKVGINNPHR;
KRKVGVENPHR; RRKIGLNNPHR; HRKLGINNPHR; KHRVGINNPHR;
RRKVGVEEPHR; HRKIGLNNPHR; KHRLGINNPHR; RHRVGINNPHR;
HRKVGVENPHR; KHRIGLNNPHR; RHRLGINNPHR; HHRVGINNPHR;
KHRVGVENPHR; RHRIGLNNPHR; HHRLGINNPHR; KKRVGINNPHR;
RHRVGVENPHR; HHRIGLNNPHR; KKRLGINNPHR; RKRVGINNPHR;
HHRVGVENPHR; KKRIGLNNPHR; RKRLGINNPHR; HKRVGINNPHR;
KRRVGINNPHR; RRRIGVNNPHR; HRRLGLEEPHH; KHHLGIEEPHH;
RRRVGINNPHR; HRRIGVNNPHR; KHHIGLEEPHH; RHHLGIEEPHH;
HRRVGINNPHR; KHHVGVNNPHR; RHHIGLEEPHH; HHHLGIEEPHH;
KHHLGVNNPHR; RHHVGVNNPHR; HHHIGLEEPHH; KKHLGIEEPHH;
RHHLGVNNPHR; HHHVGVNNPHR; KKHIGLEEPHH; RKHLGIEEPHH;
HHHLGVNNPHR; KKHVGVNNPHR; RKHIGLEEPHH; HKHLGIEEPHH;
KKHLGVNNPHR; RKHVGVNNPHR; HKHIGLEEPHH; KRHLGIEEPHH;
RKHLGVNNPHR; HKHVGVNNPHR; KRHIGLEEPHH; RRHLGIEEPHH;
HKHLGVNNPHR; KRHVGVNNPHR; RRHIGLEEPHH; HRHLGIEEPHH;
KRHLGVNNPHR; RRHVGVNNPHR; HRHIGLEEPHH; KHKLGIEEPHH;
RRHLGVNNPHR; HRHVGVNNPHR; KHKIGLEEPHH; RHKLGIEEPHH;
HRHLGVNNPHR; KHKVGVNNPHR; RHKIGLEEPHH; HHKLGIEEPHH;
KHKLGVNNPHR; RHKVGVNNPHR; HHKIGLEEPHH; KKKLGIEEPHH;
RHKLGVNNPHR; HHKVGVNNPHR; KKKIGLEEPHH; RKKLGIEEPHH;
HHKLGVNNPHR; KKKVGVNNPHR; RKKIGLEEPHH; HKKLGIEEPHH;
KKKLGVNNPHR; RKKVGVNNPHR; HKKIGLEEPHH; KRKLGIEEPHH;
RKKLGVNNPHR; HKKVGVNNPHR; KRKIGLEEPHH; RRKLGIEEPHH;
HKKLGVNNPHR; KRKVGVNNPHR; RRKIGLEEPHH; HRKLGIEEPHH;
KRKLGVNNPHR; RRKVGVNNPHR; HRKIGLEEPHH; KHRLGIEEPHH;
RRKLGVNNPHR; HRKVGVNNPHR; KHRIGLEEPHH; RHRLGIEEPHH;
HRKLGVNNPHR; KHRVGVNNPHR; RHRIGLEEPHH; HHRLGIEEPHH;
KHRLGVNNPHR; RHRVGVNNPHR; HHRIGLEEPHH; KKRLGIEEPHH;
RHRLGVNNPHR; HHRVGVNNPHR; KKRIGLEEPHH; RKRLGIEEPHH;
HHRLGVNNPHR; KKRVGVNNPHR; RKRIGLEEPHH; HKRLGIEEPHH;
KKRLGVNNPHR; RKRVGVNNPHR; HKRIGLEEPHH; KRRLGIEEPHH;
RKRLGVNNPHR; HKRVGVNNPHR; KRRIGLEEPHH; RRRLGIEEPHH;
HKRLGVNNPHR; KRRVGVNNPHR; RRRIGLEEPHH; HRRLGIEEPHH;
KRRLGVNNPHR; RRRVGVNNPHR; HRRIGLEEPHH; KHHIGIEEPHH;
RRRLGVNNPHR; HRRVGVNNPHR; KHHVGLEEPHH; RHHIGIEEPHH;
HRRLGVNNPHR; KHHLGLEEPHH; RHHVGLEEPHH; HHHIGIEEPHH;
KHHIGVNNPHR; RHHLGLEEPHH; HHHVGLEEPHH; KKHIGIEEPHH;
RHHIGVNNPHR; HHHLGLEEPHH; KKHVGLEEPHH; RKHIGIEEPHH;
HHHIGVNNPHR; KKHLGLEEPHH; RKHVGLEEPHH; HKHIGIEEPHH;
KKHIGVNNPHR; RKHLGLEEPHH; HKHVGLEEPHH; KRHIGIEEPHH;
RKHIGVNNPHR; HKHLGLEEPHH; KRHVGLEEPHH; RRHIGIEEPHH;
HKHIGVNNPHR; KRHLGLEEPHH; RRHVGLEEPHH; HRHIGIEEPHH;
KRHIGVNNPHR; RRHLGLEEPHH; HRHVGLEEPHH; KHKIGIEEPHH;
RRHIGVNNPHR; HRHLGLEEPHH; KHKVGLEEPHH; RHKIGIEEPHH;
HRHIGVNNPHR; KHKLGLEEPHH; RHKVGLEEPHH; HHKIGIEEPHH;
KHKIGVNNPHR; RHKLGLEEPHH; HHKVGLEEPHH; KKKIGIEEPHH;
RHKIGVNNPHR; HHKLGLEEPHH; KKKVGLEEPHH; RKKIGIEEPHH;
HHKIGVNNPHR; KKKLGLEEPHH; RKKVGLEEPHH; HKKIGIEEPHH;
KKKIGVNNPHR; RKKLGLEEPHH; HKKVGLEEPHH; KRKIGIEEPHH;
RKKIGVNNPHR; HKKLGLEEPHH; KRKVGLEEPHH; RRKIGIEEPHH;
HKKIGVNNPHR; KRKLGLEEPHH; RRKVGLEEPHH; HRKIGIEEPHH;
KRKIGVNNPHR; RRKLGLEEPHH; HRKVGLEEPHH; KHRIGIEEPHH;
RRKIGVNNPHR; HRKLGLEEPHH; KHRVGLEEPHH; RHRIGIEEPHH;
HRKIGVNNPHR; KHRLGLEEPHH; RHRVGLEEPHH; HHRIGIEEPHH;
KHRIGVNNPHR; RHRLGLEEPHH; HHRVGLEEPHH; KKRIGIEEPHH;
RHRIGVNNPHR; HHRLGLEEPHH; KKRVGLEEPHH; RKRIGIEEPHH;
HHRIGVNNPHR; KKRLGLEEPHH; RKRVGLEEPHH; HKRIGIEEPHH;
KKRIGVNNPHR; RKRLGLEEPHH; HKRVGLEEPHH; KRRIGIEEPHH;
RKRIGVNNPHR; HKRLGLEEPHH; KRRVGLEEPHH; RRRIGIEEPHH;
HKRIGVNNPHR; KRRLGLEEPHH; RRRVGLEEPHH; HRRIGIEEPHH;
KRRIGVNNPHR; RRRLGLEEPHH; HRRVGLEEPHH; KHHVGIEEPHH;
RHHVGIEEPHH; HHHIGVEEPHH; KKHLGLNEPHH; RKHVGLNEPHH;
HHHVGIEEPHH; KKHIGVEEPHH; RKHLGLNEPHH; HKHVGLNEPHH;
KKHVGIEEPHH; RKHIGVEEPHH; HKHLGLNEPHH; KRHVGLNEPHH;
RKHVGIEEPHH; HKHIGVEEPHH; KRHLGLNEPHH; RRHVGLNEPHH;
HKHVGIEEPHH; KRHIGVEEPHH; RRHLGLNEPHH; HRHVGLNEPHH;
KRHVGIEEPHH; RRHIGVEEPHH; HRHLGLNEPHH; KHKVGLNEPHH;
RRHVGIEEPHH; HRHIGVEEPHH; KHKLGLNEPHH; RHKVGLNEPHH;
HRHVGIEEPHH; KHKIGVEEPHH; RHKLGLNEPHH; HHKVGLNEPHH;
KHKVGIEEPHH; RHKIGVEEPHH; HHKLGLNEPHH; KKKVGLNEPHH;
RHKVGIEEPHH; HHKIGVEEPHH; KKKLGLNEPHH; RKKVGLNEPHH;
HHKVGIEEPHH; KKKIGVEEPHH; RKKLGLNEPHH; HKKVGLNEPHH;
KKKVGIEEPHH; RKKIGVEEPHH; HKKLGLNEPHH; KRKVGLNEPHH;
RKKVGIEEPHH; HKKIGVEEPHH; KRKLGLNEPHH; RRKVGLNEPHH;
HKKVGIEEPHH; KRKIGVEEPHH; RRKLGLNEPHH; HRKVGLNEPHH;
KRKVGIEEPHH; RRKIGVEEPHH; HRKLGLNEPHH; KHRVGLNEPHH;
RRKVGIEEPHH; HRKIGVEEPHH; KHRLGLNEPHH; RHRVGLNEPHH;
HRKVGIEEPHH; KHRIGVEEPHH; RHRLGLNEPHH; HHRVGLNEPHH;
KHRVGIEEPHH; RHRIGVEEPHH; HHRLGLNEPHH; KKRVGLNEPHH;
RHRVGIEEPHH; HHRIGVEEPHH; KKRLGLNEPHH; RKRVGLNEPHH;
HHRVGIEEPHH; KKRIGVEEPHH; RKRLGLNEPHH; HKRVGLNEPHH;
KKRVGIEEPHH; RKRIGVEEPHH; HKRLGLNEPHH; KRRVGLNEPHH;
RKRVGIEEPHH; HKRIGVEEPHH; KRRLGLNEPHH; RRRVGLNEPHH;
HKRVGIEEPHH; KRRIGVEEPHH; RRRLGLNEPHH; HRRVGLNEPHH;
KRRVGIEEPHH; RRRIGVEEPHH; HRRLGLNEPHH; KHHLGINEPHH;
RRRVGIEEPHH; HRRIGVEEPHH; KHHIGLNPHH; RHHLGINEPHH;
HRRVGIEEPHH; KHHVGVEEPHH; RHHIGLNEPHH; HHHLGINEPHH;
KHHLGVEEPHH; RHHVGVEEPHH; HHHIGLNEPHH; KKHLGINEPHH;
RHHLGVEEPHH; HHHVGVEEPHH; KKHIGLNEPHH; RKHLGINEPHH;
HHHLGVEEPHH; KKHVGVEEPHH; RKHIGLNEPHH; HKHLGINEPHH;
KKHLGVEEPHH; RKHVGVEEPHH; HKHIGLNEPHH; KRHLGINEPHH;
RKHLGVEEPHH; HKHVGVEEPHH; KRHIGLNEPHH; RRHLGINEPHH;
HKHLGVEEPHH; KRHVGVEEPHH; RRHIGLNEPHH; HRHLGINEPHH;
KRHLGVEEPHH; RRHVGVEEPHH; HRHIGLNEPHH; KHKLGINEPHH;
RRHLGVEEPHH; HRHVGVEEPHH; KHKIGLNEPHH; RHKLGINEPHH;
HRHLGVEEPHH; KHKVGVEEPHH; RHKIGLNEPHH; HHKLGINEPHH;
KHKLGVEEPHH; RHKVGVEEPHH; HHKIGLNEPHH; KKKLGINEPHH;
RHKLGVEEPHH; HHKVGVEEPHH; KKKIGLNEPHH; RKKLGINEPHH;
HHKLGVEEPHH; KKKVGVEEPHH; RKKIGLNEPHH; HKKLGINEPHH;
KKKLGVEEPHH; RKKVGVEEPHH; HKKIGLNEPHH; KRKLGINEPHH;
RKKLGVEEPHH; HKKVGVEEPHH; KRKIGLNEPHH; RRKLGINEPHH;
HKKLGVEEPHH; KRKVGVEEPHH; RRKIGLNEPHH; HRKLGINEPHH;
KRKLGVEEPHH; RRKVGVEEPHH; HRKIGLNEPHH; KHRLGINEPHH;
RRKLGVEEPHH; HRKVGVEEPHH; KHRIGLNEPHH; RHRLGINEPHH;
HRKLGVEEPHH; KHRVGVEEPHH; RHRIGLNEPHH; HHRLGINEPHH;
KHRLGVEEPHH; RHRVGVEEPHH; HHRIGLNEPHH; KKRLGINEPHH;
RHRLGVEEPHH; HHRVGVEEPHH; KKRIGLNEPHH; RKRLGINEPHH;
HHRLGVEEPHH; KKRVGVEEPHH; RKRIGLNEPHH; HKRLGINEPHH;
KKRLGVEEPHH; RKRVGVEEPHH; HKRIGLNEPHH; KRRLGINEPHH;
RKRLGVEEPHH; HKRVGVEEPHH; KRRIGLNEPHH; RRRLGINEPHH;
HKRLGVEEPHH; KRRVGVEEPHH; RRRIGLNEPHH; HRRLGINEPHH;
KRRLGVEEPHH; RRRVGVEEPHH; HRRIGLNEPHH; KHHIGIENPHH;
RRRLGVEEPHH; HRRVGVEEPHH; KHHVGLNEPHH; RHHIGINEPHH;
HRRLGVEEPHH; KHHLGLNEPHH; RHHVGLNEPHH; HHHIGINEPHH;
KHHIGVEEPHH; RHHLGLNEPHH; HHHVGLNEPHH; KKHIGINEPHH;
RHHIGVEEPHH; HHHLGLNEPHH; KKHVGLNEPHH; RKHIGINEPHH;
HKHIGINEPHH; KRHLGVNEPHH; RRHVGVNEPHH; HRHIGLENPHH;
KRHIGINEPHH; RRHLGVNEPHH; HRHVGVNEPHH; KHKIGLENPHH;
RRHIGINEPHH; HRHLGVNEPHH; KHKVGVNEPHH; RHKIGLENPHH;
HRHIGINEPHH; KHKLGVNEPHH; RHKVGVNEPHH; HHKIGLENPHH;
KHKIGINEPHH; RHKLGVNEPHH; HHKVGVNEPHH; KKKIGLENPHH;
RHKIGINEPHH; HHKLGVNEPHH; KKKVGVNEPHH; RKKIGLENPHH;
HHKIGINEPHH; KKKLGVNEPHH; RKKVGVNEPHH; HKKIGLENPHH;
KKKIGINEPHH; RKKLGVNEPHH; HKKVGVNEPHH; KRKIGLENPHH;
RKKIGINEPHH; HKKLGVNEPHH; KRKVGVNEPHH; RRKIGLENPHH;
HKKIGINEPHH; KRKLGVNEPHH; RRKVGVNEPHH; HRKIGLENPHH;
KRKIGINEPHH; RRKLGVNEPHH; HRKVGVNEPHH; KHRIGLENPHH;
RRKIGINEPHH; HRKLGVNEPHH; KHRVGVNEPHH; RHRIGLENPHH;
HRKIGINEPHH; KHRLGVNEPHH; RHRVGVNEPHH; HHRIGLENPHH;
KHRIGINEPHH; RHRLGVNEPHH; HHRVGVNEPHH; KKRIGLENPHH;
RHRIGINEPHH; HHRLGVNEPHH; KKRVGVNEPHH; RKRIGLENPHH;
HHRIGINEPHH; KKRLGVNEPHH; RKRVGVNEPHH; HKRIGLENPHH;
KKRIGINEPHH; RKRLGVNEPHH; HKRVGVNEPHH; KRRIGLENPHH;
RKRIGINEPHH; HKRLGVNEPHH; KRRVGVNEPHH; RRRIGLENPHH;
HKRIGINEPHH; KRRLGVNEPHH; RRRVGVNEPHH; HRRIGLENPHH;
KRRIGINEPHH; RRRLGVNEPHH; HRRVGVNEPHH; KHHVGLENPHH;
RRRIGINEPHH; HRRLGVNEPHH; KHHLGLENPHH; RHHVGLENPHH;
HRRIGINEPHH; KHHIGVNEPHH; RHHLGLENPHH; HHHVGLENPHH;
KHHVGINEPHH; RHHIGVNEPHH; HHHLGLENPHH; KKHVGLENPHH;
RHHVGINEPHH; HHHIGVNEPHH; KKHLGLENPHH; RKHVGLENPHH;
HHHVGINEPHH; KKHIGVNEPHH; RKHLGLENPHH; HKHVGLENPHH;
KKHVGINEPHH; RKHIGVNEPHH; HKHLGLENPHH; KRHVGLENPHH;
RKHVGINEPHH; HKHIGVNEPHH; KRHLGLENPHH; RRHVGLENPHH;
HKHVGINEPHH; KRHIGVNEPHH; RRHLGLENPHH; HRHVGLENPHH;
KRHVGINEPHH; RRHIGVNEPHH; HRHLGLENPHH; KHKVGLENPHH;
RRHVGINEPHH; HRHIGVNEPHH; KHKLGLENPHH; RHKVGLENPHH;
HRHVGINEPHH; KHKIGVNEPHH; RHKLGLENPHH; HHKVGLENPHH;
KHKVGINEPHH; RHKIGVNEPHH; HHKLGLENPHH; KKKVGLENPHH;
RHKVGINEPHH; HHKIGVNEPHH; KKKLGLENPHH; RKKVGLENPHH;
HHKVGINEPHH; KKKIGVNEPHH; RKKLGLENPHH; HKKVGLENPHH;
KKKVGINEPHH; RKKIGVNEPHH; HKKLGLENPHH; KRKVGLENPHH;
RKKVGINEPHH; HKKIGVNEPHH; KRKLGLENPHH; RRKVGLENPHH;
HKKVGINEPHH; KRKIGVNEPHH; RRKLGLENPHH; HRKVGLENPHH;
KRKVGINEPHH; RRKIGVNEPHH; HRKLGLENPHH; KHRVGLENPHH;
RRKVGINEPHH; HRKIGVNEPHH; KHRLGLENPHH; RHRVGLENPHH;
HRKVGINEPHH; KHRIGVNEPHH; RHRLGLENPHH; HHRVGLENPHH;
KHRVGINEPHH; RHRIGVNEPHH; HHRLGLENPHH; KKRVGLENPHH;
RHRVGINEPHH; HHRIGVNEPHH; KKRLGLENPHH; RKRVGLENPHH;
HHRVGINEPHH; KKRIGVNEPHH; RKRLGLENPHH; HKRVGLENPHH;
KKRVGINEPHH; RKRIGVNEPHH; HKRLGLENPHH; KRRVGLENPHH;
RKRVGINEPHH; HKRIGVNEPHH; KRRLGLENPHH; RRRVGLENPHH;
HKRVGINEPHH; KRRIGVNEPHH; RRRLGLENPHH; HRRVGLENPHH;
KRRVGINEPHH; RRRIGVNEPHH; HRRLGLENPHH; KHHLGIENPHH;
RRRVGINEPHH; HRRIGVNEPHH; KHHIGLENPHH; RHHLGIENPHH;
HRRVGINEPHH; KHHVGVNEPHH; RHHIGLENPHH; HHHLGIENPHH;
KHHLGVNEPHH; RHHVGVNEPHH; HHHIGLENPHH; KKHLGIENPHH;
RHHLGVNEPHH; HHHVGVNEPHH; KKHIGLENPHH; RKHLGIENPHH;
HHHLGVNEPHH; KKHVGVNEPHH; RKHIGLENPHH; HKHLGIENPHH;
KKHLGVNEPHH; RKHVGVNEPHH; HKHIGLENPHH; KRHLGIENPHH;
RKHLGVNEPHH; HKHVGVNEPHH; KRHIGLENPHH; RRHLGIENPHH;
HKHLGVNEPHH; KRHVGVNEPHH; RRHIGLENPHH; HRHLGIENPHH;
KHKLGIENPHH; RHKVGIENPHH; HHKIGVENPHH; KKKLGLNNPHH;
RHKLGIENPHH; HHKVGIENPHH; KKKIGVENPHH; RKKLGLNNPHH;
HHKLGIENPHH; KKKVGIENPHH; RKKIGVENPHH; HKKLGLNNPHH;
KKKLGIENPHH; RKKVGIENPHH; HKKIGVENPHH; KRKLGLNNPHH;
RKKLGIENPHH; HKKVGIENPHH; KRKIGVENPHH; RRKLGLNNPHH;
HKKLGIENPHH; KRKVGIENPHH; RRKIGVENPHH; HRKLGLNNPHH;
KRKLGIENPHH; RRKVGIENPHH; HRKIGVENPHH; KHRLGLNNPHH;
RRKLGIENPHH; HRKVGIENPHH; KHRIGVENPHH; RHRLGLNNPHH;
HRKLGIENPHH; KHRVGIENPHH; RHRIGVENPHH; HHRLGLNNPHH;
KHRLGIENPHH; RHRVGIENPHH; HHRIGVENPHH; KKRLGLNNPHH;
RHRLGIENPHH; HHRVGIENPHH; KKRIGVENPHH; RKRLGLNNPHH;
HHRLGIENPHH; KKRVGIENPHH; RKRIGVENPHH; HKRLGLNNPHH;
KKRLGIENPHH; RKRVGIENPHH; HKRIGVENPHH; KRRLGLNNPHH;
RKRLGIENPHH; HKRVGIENPHH; KRRIGVENPHH; RRRLGLNNPHH;
HKRLGIENPHH; KRRVGIENPHH; RRRIGVENPHH; HRRLGLNNPHH;
KRRLGIENPHH; RRRVGIENPHH; HRRIGVENPHH; KHHIGLNNPHH;
RRRLGIENPHH; HRRVGIENPHH; KHHVGVENPHH; RHHIGLNNPHH;
HRRLGIENPHH; KHHLGVENPHH; RHHVGVENPHH; HHHIGLNNPHH;
KHHIGIENPHH; RHHLGVENPHH; HHHVGVENPHH; KKHIGLNNPHH;
RHHIGIENPHH; HHHLGVENPHH; KKHVGVENPHH; RKHIGLNNPHH;
HHHIGIENPHH; KKHLGVENPHH; RKHVGVENPHH; HKHIGLNNPHH;
KKHIGIENPHH; RKHLGVENPHH; HKHVGVENPHH; KRHIGLNNPHH;
RKHIGIENPHH; HKHLGVENPHH; KRHVGVENPHH; RRHIGLNNPHH;
HKHIGIENPHH; KRHLGVENPHH; RRHVGVENPHH; HRHIGLNNPHH;
KRHIGIENPHH; RRHLGVENPHH; HRHVGVENPHH; KHKIGLNNPHH;
RRHIGIENPHH; HRHLGVENPHH; KHKVGVENPHH; RHKIGLNNPHH;
HRHIGIENPHH; KHKLGVENPHH; RHKVGVENPHH; HHKIGLNNPHH;
KHKIGIENPHH; RHKLGVENPHH; HHKVGVENPHH; KKKIGLNNPHH;
RHKIGIENPHH; HHKLGVENPHH; KKKVGVENPHH; RKKIGLNNPHH;
HHKIGIENPHH; KKKLGVENPHH; RKKVGVENPHH; HKKIGLNNPHH;
KKKIGIENPHH; RKKLGVENPHH; HKKVGVENPHH; KRKIGLNNPHH;
RKKIGIENPHH; HKKLGVENPHH; KRKVGVENPHH; RRKIGLNNPHH;
HKKIGIENPHH; KRKLGVENPHH; RRKVGVEEPHH; HRKIGLNNPHH;
KRKIGIENPHH; RRKLGVENPHH; HRKVGVENPHH; KHRIGLNNPHH;
RRKIGIENPHH; HRKLGVENPHH; KHRVGVENPHH; RHRIGLNNPHH;
HRKIGIENPHH; KHRLGVENPHH; RHRVGVENPHH; HHRIGLNNPHH;
KHRIGIENPHH; RHRLGVENPHH; HHRVGVENPHH; KKRIGLNNPHH;
RHRIGIENPHH; HHRLGVENPHH; KKRVGVENPHH; RKRIGLNNPHH;
HHRIGIENPHH; KKRLGVENPHH; RKRVGVENPHH; HKRIGLNNPHH;
KKRIGIENPHH; RKRLGVENPHH; HKRVGVENPHH; KRRIGLNNPHH;
RKRIGIENPHH; HKRLGVENPHH; KRRVGVENPHH; RRRIGLNNPHH;
HKRIGIENPHH; KRRLGVENPHH; RRRVGVENPHH; HRRIGLNNPHH;
KRRIGIENPHH; RRRLGVENPHH; HRRVGVENPHH; KHHVGLNNPHH;
RRRIGIENPHH; HRRLGVENPHH; KHHLGLNNPHH; RHHVGLNNPHH;
HRRIGIENPHH; KHHIGVENPHH; RHHLGLNNPHH; HHHVGLNNPHH;
KHHVGIENPHH; RHHIGVEEPHH; HHHLGLNNPHH; KKHVGLNNPHH;
RHHVGIENPHH; HHHIGVENPHH; KKHLGLNNPHH; RKHVGLNNPHH;
HHHVGIENPHH; KKHIGVENPHH; RKHLGLNNPHH; HKHVGLNNPHH;
KKHVGIENPHH; RKHIGVENPHH; HKHLGLNNPHH; KRHVGLNNPHH;
RKHVGIENPHH; HKHIGVENPHH; KRHLGLNNPHH; RRHVGLNNPHH;
HKHVGIENPHH; KRHIGVENPHH; RRHLGLNNPHH; HRHVGLNNPHH;
KRHVGIENPHH; RRHIGVENPHH; HRHLGLNNPHH; KHKVGLNNPHH;
RRHVGIENPHH; HRHIGVENPHH; KHKLGLNNPHH; RHKVGLNNPHH;
HRHVGIENPHH; KHKIGVENPHH; RHKLGLNNPHH; HHKVGLNNPHH;
KHKVGIENPHH; RHKIGVENPHH; HHKLGLNNPHH; KKKVGLNNPHH;
RKKVGLNNPHH; HKKIGINNPHH; KRKLGVNNPHH; RRKVGVNNPHH;
HKKVGLNNPHH; KRKIGINNPHH; RRKLGVNNPHH; HRKVGVNNPHH;
KRKVGLNNPHH; RRKIGINNPHH; HRKLGVNNPHH; KHRVGVNNPHH;
RRKVGLNNPHH; HRKIGINNPHH; KHRLGVNNPHH; RHRVGVNNPHH;
HRKVGLNNPHH; KHRIGINNPHH; RHRLGVNNPHH; HHRVGVNNPHH;
KHRVGLNNPHH; RHRIGINNPHH; HHRLGVNNPHH; KKRVGVNNPHH;
RHRVGLNNPHH; HHRIGINNPHH; KKRLGVNNPHH; RKRVGVNNPHH;
HHRVGLNNPHH; KKRIGINNPHH; RKRLGVNNPHH; HKRVGVNNPHH;
KKRVGLNNPHH; RKRIGINNPHH; HKRLGVNNPHH; KRRVGVNNPHH;
RKRVGLNNPHH; HKRIGINNPHH; KRRLGVNNPHH; RRRVGVNNPHH;
HKRVGLNNPHH; KRRIGINNPHH; RRRLGVNNPHH; HRRVGVNNPHH
KRRVGLNNPHH; RRRIGINNPHH; HRRLGVNNPHH;
RRRVGLNNPHH; HRRIGINNPHH; KHHIGVNNPHH;
HRRVGLNNPHH; KHHVGINNPHH; RHHIGVNNPHH;
KHHLGINNPHH; RHHVGINNPHH; HHHIGVNNPHH;
RHHLGINNPHH; HHHVGINNPHH; KKHIGVNNPHH;
HHHLGINNPHH; KKHVGINNPHH; RKHIGVNNPHH;
KKHLGINNPHH; RKHVGINNPHH; HKHIGVNNPHH;
RKHLGINNPHH; HKHVGINNPHH; KRHIGVNNPHH;
HKHLGINNPHH; KRHVGINNPHH; RRHIGVNNPHH;
KRHLGINNPHH; RRHVGINNPHH; HRHIGVNNPHH;
RRHLGINNPHH; HRHVGINNPHH; KHKIGVNNPHH;
HRHLGINNPHH; KHKVGINNPHH; RHKIGVNNPHH;
KHKLGINNPHH; RHKVGINNPHH; HHKIGVNNPHH;
RHKLGINNPHH; HHKVGINNPHH; KKKIGVNNPHH;
HHKLGINNPHH; KKKVGINNPHH; RKKIGVNNPHH;
KKKLGINNPHH; RKKVGINNPHH; HKKIGVNNPHH;
RKKLGINNPHH; HKKVGINNPHH; KRKIGVNNPHH;
HKKLGINNPHH; KRKVGINNPHH; RRKIGVNNPHH;
KRKLGINNPHH; RRKVGINNPHH; HRKIGVNNPHH;
RRKLGINNPHH; HRKVGINNPHH; KHRIGVNNPHH;
HRKLGINNPHH; KHRVGINNPHH; RHRIGVNNPHH;
KHRLGINNPHH; RHRVGINNPHH; HHRIGVNNPHH;
RHRLGINNPHH; HHRVGINNPHH; KKRIGVNNPHH;
HHRLGINNPHH; KKRVGINNPHH; RKRIGVNNPHH;
KKRLGINNPHH; RKRVGINNPHH; HKRIGVNNPHH;
RKRLGINNPHH; HKRVGINNPHH; KRRIGVNNPHH;
HKRLGINNPHH; KRRVGINNPHH; RRRIGVNNPHH;
KRRLGINNPHH; RRRVGINNPHH; HRRIGVNNPHH;
RRRLGINNPHH; HRRVGINNPHH; KHHVGVNNPHH;
HRRLGINNPHH; KHHLGVNNPHH; RHHVGVNNPHH;
KHHIGIENPHH; RHHLGVNNPHH; HHHVGVNNPHH;
RHHIGINNPHH; HHHLGVNNPHH; KKHVGVNNPHH;
HHHIGINNPHH; KKHLGVNNPHH; RKHVGVNNPHH;
KKHIGINNPHH; RKHLGVNNPHH; HKHVGVNNPHH;
RKHIGINNPHH; HKHLGVNNPHH; KRHVGVNNPHH;
HKHIGINNPHH; KRHLGVNNPHH; RRHVGVNNPHH;
KRHIGINNPHH; RRHLGVNNPHH; HRHVGVNNPHH;
RRHIGINNPHH; HRHLGVNNPHH; KHKVGVNNPHH;
HRHIGINNPHH; KHKLGVNNPHH; RHKVGVNNPHH;
KHKIGINNPHH; RHKLGVNNPHH; HHKVGVNNPHH;
RHKIGINNPHH; HHKLGVNNPHH; KKKVGVNNPHH;
HHKIGINNPHH; KKKLGVNNPHH; RKKVGVNNPHH;
KKKIGINNPHH; RKKLGVNNPHH; HKKVGVNNPHH;
RKKIGINNPHH; HKKLGVNNPHH; KRKVGVNNPHH;

The application's sequence listing, which the Patent Office published only in electronic form, follows.

SEQUENCE LISTING (8752 sequences)

SEQ ID NO: 1 - protein, 13 aa, Artificial
  IGFBP-2 heparin binding domain-containing peptide sequence
KHHLGLEEPKKLR

SEQ ID NO: 2 - protein, 11 aa, Artificial
  IGFBP-2 heparin binding domain-containing peptide sequence
KHHLGLEEPKK

SEQ ID NO: 3 - protein, 11 aa, Artificial
  IGFBP-2 heparin binding domain-containing peptide sequence
HLGLEEPKKLR

SEQ ID NO: 4 - protein, 13 aa, Artificial
  General heparin binding domain-containing peptide sequence
  MISC_FEATURE (1)..(2): Xaa is optionally present and when present is a positively charged amino acid at pH 6.0
  misc_feature (3)..(9): Xaa can be any naturally occurring amino acid
  MISC_FEATURE (10)..(11): Xaa is a positively charged amino acid at pH 6.0
  MISC_FEATURE (12)..(12): Xaa is optionally present and when present can be any naturally occurring amino acid
  MISC_FEATURE (13)..(13): Xaa is optionally present and when present is a positively charged amino acid at pH 6.0
XXXXXXXXXXXXX

SEQ ID NO: 5 - protein, 11 aa, Artificial
  IGFBP-2 heparin binding domain-containing peptide sequence
KHHLGLEEPKK

SEQ ID NO: 6 - protein, 11 aa, Artificial
  IGFBP-2 heparin binding domain-containing peptide sequence
RHHLGLEEPKK

SEQ ID NO: 7 - protein, 11 aa, Artificial
  IGFBP-2 heparin binding domain-containing peptide sequence
HHHLGLEEPKK

SEQ ID NO: 8 - protein, 11 aa, Artificial
  IGFBP-2 heparin binding domain-containing peptide sequence
KKHLGLEEPKK

SEQ ID NO: 9 - protein, 11 aa, Artificial
  IGFBP-2 heparin binding domain-containing peptide sequence
RKHLGLEEPKK

SEQ ID NO: 10 - protein, 11 aa, Artificial
  IGFBP-2 heparin binding domain-containing peptide sequence
HKHLGLEEPKK

SEQ ID NO: 11 - protein, 11 aa, Artificial
  IGFBP-2 heparin binding domain-containing peptide sequence
KRHLGLEEPKK

SEQ ID NO: 12 - protein, 11 aa, Artificial
  IGFBP-2 heparin binding domain-containing peptide sequence
RRHLGLEEPKK

SEQ ID NO: 13 - protein, 11 aa, Artificial
  IGFBP-2 heparin binding domain-containing peptide sequence
HRHLGLEEPKK

SEQ ID NO: 14 - protein, 11 aa, Artificial
  IGFBP-2 heparin binding domain-containing peptide sequence
KHKLGLEEPKK

SEQ ID NO: 15 - protein, 11 aa, Artificial
  IGFBP-2 heparin binding domain-containing peptide sequence
RHKLGLEEPKK

SEQ ID NO: 16 - protein, 11 aa, Artificial
  IGFBP-2 heparin binding domain-containing peptide sequence
HHKLGLEEPKK

SEQ ID NO: 17 - protein, 11 aa, Artificial
  IGFBP-2 heparin binding domain-containing peptide sequence
KKKLGLEEPKK

SEQ ID NO: 18 - protein, 11 aa, Artificial
  IGFBP-2 heparin binding domain-containing peptide sequence
RKKLGLEEPKK

SEQ ID NO: 19 - protein, 11 aa, Artificial
  IGFBP-2 heparin binding domain-containing peptide sequence
HKKLGLEEPKK

SEQ ID NO: 20 - protein, 11 aa, Artificial
  IGFBP-2 heparin binding domain-containing peptide sequence
KRKLGLEEPKK

SEQ ID NO: 21 - protein, 11 aa, Artificial
  IGFBP-2 heparin binding domain-containing peptide sequence
RRKLGLEEPKK

SEQ ID NO: 22 - protein, 11 aa, Artificial
  IGFBP-2 heparin binding domain-containing peptide sequence
HRKLGLEEPKK

SEQ ID NO: 23 - protein, 11 aa, Artificial
  IGFBP-2 heparin binding domain-containing peptide sequence
KHRLGLEEPKK

SEQ ID NO: 24 - protein, 11 aa, Artificial
  IGFBP-2 heparin binding domain-containing peptide sequence
RHRLGLEEPKK

SEQ ID NO: 25 - protein, 11 aa, Artificial
  IGFBP-2 heparin binding domain-containing peptide sequence
HHRLGLEEPKK

SEQ ID NO: 26 - protein, 11 aa, Artificial
  IGFBP-2 heparin binding domain-containing peptide sequence
KKRLGLEEPKK

SEQ ID NO: 27 - protein, 11 aa, Artificial
  IGFBP-2 heparin binding domain-containing peptide sequence
RKRLGLEEPKK

SEQ ID NO: 28 - protein, 11 aa, Artificial
  IGFBP-2 heparin binding domain-containing peptide sequence
HKRLGLEEPKK

SEQ ID NO: 29 - protein, 11 aa, Artificial
  IGFBP-2 heparin binding domain-containing peptide sequence
KRRLGLEEPKK

SEQ ID NO: 30 - protein, 11 aa, Artificial
  IGFBP-2 heparin binding domain-containing peptide sequence
RRRLGLEEPKK

SEQ ID NO: 31 - protein, 11 aa, Artificial
  IGFBP-2 heparin binding domain-containing peptide sequence
HRRLGLEEPKK

SEQ ID NO: 32 - protein, 11 aa, Artificial
  IGFBP-2 heparin binding domain-containing peptide sequence
KHHIGLEEPKK

SEQ ID NO: 33 - protein, 11 aa, Artificial
  IGFBP-2 heparin binding domain-containing peptide sequence
RHHIGLEEPKK

SEQ ID NO: 34 - protein, 11 aa, Artificial
  IGFBP-2 heparin binding domain-containing peptide sequence
HHHIGLEEPKK

SEQ ID NO: 35 - protein, 11 aa, Artificial
  IGFBP-2 heparin binding domain-containing peptide sequence
KKHIGLEEPKK

SEQ ID NO: 36 - protein, 11 aa, Artificial
  IGFBP-2 heparin binding domain-containing peptide sequence
RKHIGLEEPKK

SEQ ID NO: 37 - protein, 11 aa, Artificial
  IGFBP-2 heparin binding domain-containing peptide sequence
HKHIGLEEPKK

SEQ ID NO: 38 - protein, 11 aa, Artificial
  IGFBP-2 heparin binding domain-containing peptide sequence
KRHIGLEEPKK

SEQ ID NO: 39 - protein, 11 aa, Artificial
  IGFBP-2 heparin binding domain-containing peptide sequence
RRHIGLEEPKK

SEQ ID NO: 40 - protein, 11 aa, Artificial
  IGFBP-2 heparin binding domain-containing peptide sequence
HRHIGLEEPKK

SEQ ID NO: 41 - protein, 11 aa, Artificial
  IGFBP-2 heparin binding domain-containing peptide sequence
KHKIGLEEPKK

SEQ ID NO: 42 - protein, 11 aa, Artificial
  IGFBP-2 heparin binding domain-containing peptide sequence
RHKIGLEEPKK

SEQ ID NO: 43 - protein, 11 aa, Artificial
  IGFBP-2 heparin binding domain-containing peptide sequence
HHKIGLEEPKK

SEQ ID NO: 44 - protein, 11 aa, Artificial
  IGFBP-2 heparin binding domain-containing peptide sequence
KKKIGLEEPKK

SEQ ID NO: 45 - protein, 11 aa, Artificial
  IGFBP-2 heparin binding domain-containing peptide sequence
RKKIGLEEPKK

SEQ ID NO: 46 - protein, 11 aa, Artificial
  IGFBP-2 heparin binding domain-containing peptide sequence
HKKIGLEEPKK

SEQ ID NO: 47 - protein, 11 aa, Artificial
  IGFBP-2 heparin binding domain-containing peptide sequence
KRKIGLEEPKK

SEQ ID NO: 48 - protein, 11 aa, Artificial
  IGFBP-2 heparin binding domain-containing peptide sequence
RRKIGLEEPKK

SEQ ID NO: 49 - protein, 11 aa, Artificial
  IGFBP-2 heparin binding domain-containing peptide sequence
HRKIGLEEPKK

SEQ ID NO: 50 - protein, 11 aa, Artificial
  IGFBP-2 heparin binding domain-containing peptide sequence
KHRIGLEEPKK

SEQ ID NO: 51 - protein, 11 aa, Artificial
  IGFBP-2 heparin binding domain-containing peptide sequence
RHRIGLEEPKK

SEQ ID NO: 52 - protein, 11 aa, Artificial
  IGFBP-2 heparin binding domain-containing peptide sequence
HHRIGLEEPKK

SEQ ID NO: 53 - protein, 11 aa, Artificial
  IGFBP-2 heparin binding domain-containing peptide sequence
KKRIGLEEPKK

SEQ ID NO: 54 - protein, 11 aa, Artificial
  IGFBP-2 heparin binding domain-containing peptide sequence
RKRIGLEEPKK

SEQ ID NO: 55 - protein, 11 aa, Artificial
  IGFBP-2 heparin binding domain-containing peptide sequence
HKRIGLEEPKK

SEQ ID NO: 56 - protein, 11 aa, Artificial
  IGFBP-2 heparin binding domain-containing peptide sequence
KRRIGLEEPKK

SEQ ID NO: 57 - protein, 11 aa, Artificial
  IGFBP-2 heparin binding domain-containing peptide sequence
RRRIGLEEPKK

SEQ ID NO: 58 - protein, 11 aa, Artificial
  IGFBP-2 heparin binding domain-containing peptide sequence
HRRIGLEEPKK

SEQ ID NO: 59 - protein, 11 aa, Artificial
  IGFBP-2 heparin binding domain-containing peptide sequence
KHHVGLEEPKK

SEQ ID NO: 60 - protein, 11 aa, Artificial
  IGFBP-2 heparin binding domain-containing peptide sequence
RHHVGLEEPKK

SEQ ID NO: 61 - protein, 11 aa, Artificial
  IGFBP-2 heparin binding domain-containing peptide sequence
HHHVGLEEPKK

SEQ ID NO: 62 - protein, 11 aa, Artificial
  IGFBP-2 heparin binding domain-containing peptide sequence
KKHVGLEEPKK

SEQ ID NO: 63 - protein, 11 aa, Artificial
  IGFBP-2 heparin binding domain-containing peptide sequence
RKHVGLEEPKK

SEQ ID NO: 64 - protein, 11 aa, Artificial
  IGFBP-2 heparin binding domain-containing peptide sequence
HKHVGLEEPKK

SEQ ID NO: 65 - protein, 11 aa, Artificial
  IGFBP-2 heparin binding domain-containing peptide sequence
KRHVGLEEPKK

SEQ ID NO: 66 - protein, 11 aa, Artificial
  IGFBP-2 heparin binding domain-containing peptide sequence
RRHVGLEEPKK

SEQ ID NO: 67 - protein, 11 aa, Artificial
  IGFBP-2 heparin binding domain-containing peptide sequence
HRHVGLEEPKK

SEQ ID NO: 68 - protein, 11 aa, Artificial
  IGFBP-2 heparin binding domain-containing peptide sequence
KHKVGLEEPKK

SEQ ID NO: 69 - protein, 11 aa, Artificial
  IGFBP-2 heparin binding domain-containing peptide sequence
RHKVGLEEPKK

SEQ ID NO: 70 - protein, 11 aa, Artificial
  IGFBP-2 heparin binding domain-containing peptide sequence
HHKVGLEEPKK

SEQ ID NO: 71 - protein, 11 aa, Artificial
  IGFBP-2 heparin binding domain-containing peptide sequence
KKKVGLEEPKK

SEQ ID NO: 72 - protein, 11 aa, Artificial
  IGFBP-2 heparin binding domain-containing peptide sequence
RKKVGLEEPKK

SEQ ID NO: 73 - protein, 11 aa, Artificial
  IGFBP-2 heparin binding domain-containing peptide sequence
HKKVGLEEPKK

SEQ ID NO: 74 - protein, 11 aa, Artificial
  IGFBP-2 heparin binding domain-containing peptide sequence
KRKVGLEEPKK

SEQ ID NO: 75 - protein, 11 aa, Artificial
  IGFBP-2 heparin binding domain-containing peptide sequence
RRKVGLEEPKK

SEQ ID NO: 76 - protein, 11 aa, Artificial
  IGFBP-2 heparin binding domain-containing peptide sequence
HRKVGLEEPKK

SEQ ID NO: 77 - protein, 11 aa, Artificial
  IGFBP-2 heparin binding domain-containing peptide sequence
KHRVGLEEPKK

SEQ ID NO: 78 - protein, 11 aa, Artificial
  IGFBP-2 heparin binding domain-containing peptide sequence
RHRVGLEEPKK

SEQ ID NO: 79 - protein, 11 aa, Artificial
  IGFBP-2 heparin binding domain-containing peptide sequence
HHRVGLEEPKK

SEQ ID NO: 80 - protein, 11 aa, Artificial
  IGFBP-2 heparin binding domain-containing peptide sequence
KKRVGLEEPKK

SEQ ID NO: 81 - protein, 11 aa, Artificial
  IGFBP-2 heparin binding domain-containing peptide sequence
RKRVGLEEPKK

SEQ ID NO: 82 - protein, 11 aa, Artificial
  IGFBP-2 heparin binding domain-containing peptide sequence
HKRVGLEEPKK

SEQ ID NO: 83 - protein, 11 aa, Artificial
  IGFBP-2 heparin binding domain-containing peptide sequence
KRRVGLEEPKK

SEQ ID NO: 84 - protein, 11 aa, Artificial
  IGFBP-2 heparin binding domain-containing peptide sequence
RRRVGLEEPKK

SEQ ID NO: 85 - protein, 11 aa, Artificial
  IGFBP-2 heparin binding domain-containing peptide sequence
HRRVGLEEPKK

SEQ ID NO: 86 - protein, 11 aa, Artificial
  IGFBP-2 heparin binding domain-containing peptide sequence
KHHLGIEEPKK

SEQ ID NO: 87 - protein, 11 aa, Artificial
  IGFBP-2 heparin binding domain-containing peptide sequence
RHHLGIEEPKK

SEQ ID NO: 88 - protein, 11 aa, Artificial
  IGFBP-2 heparin binding domain-containing peptide sequence
HHHLGIEEPKK

SEQ ID NO: 89 - protein, 11 aa, Artificial
  IGFBP-2 heparin binding domain-containing peptide sequence
KKHLGIEEPKK

SEQ ID NO: 90 - protein, 11 aa, Artificial
  IGFBP-2 heparin binding domain-containing peptide sequence
RKHLGIEEPKK

SEQ ID NO: 91 - protein, 11 aa, Artificial
  IGFBP-2 heparin binding domain-containing peptide sequence
HKHLGIEEPKK

SEQ ID NO: 92 - protein, 11 aa, Artificial
  IGFBP-2 heparin binding domain-containing peptide sequence
KRHLGIEEPKK

SEQ ID NO: 93 - protein, 11 aa, Artificial
  IGFBP-2 heparin binding domain-containing peptide sequence
RRHLGIEEPKK

SEQ ID NO: 94 - protein, 11 aa, Artificial
  IGFBP-2 heparin binding domain-containing peptide sequence
HRHLGIEEPKK

SEQ ID NO: 95 - protein, 11 aa, Artificial
  IGFBP-2 heparin binding domain-containing peptide sequence
KHKLGIEEPKK

SEQ ID NO: 96 - protein, 11 aa, Artificial
  IGFBP-2 heparin binding domain-containing peptide sequence
RHKLGIEEPKK

SEQ ID NO: 97 - protein, 11 aa, Artificial
  IGFBP-2 heparin binding domain-containing peptide sequence
HHKLGIEEPKK

SEQ ID NO: 98 - protein, 11 aa, Artificial
  IGFBP-2 heparin binding domain-containing peptide sequence
KKKLGIEEPKK

SEQ ID NO: 99 - protein, 11 aa, Artificial
  IGFBP-2 heparin binding domain-containing peptide sequence
RKKLGIEEPKK

SEQ ID NO: 100 - protein, 11 aa, Artificial
  IGFBP-2 heparin binding domain-containing peptide sequence
HKKLGIEEPKK

SEQ ID NO: 101 - protein, 11 aa, Artificial
  IGFBP-2 heparin binding domain-containing peptide sequence
KRKLGIEEPKK

SEQ ID NO: 102 - protein, 11 aa, Artificial
  IGFBP-2 heparin binding domain-containing peptide sequence
RRKLGIEEPKK

SEQ ID NO: 103 - protein, 11 aa, Artificial
  IGFBP-2 heparin binding domain-containing peptide sequence
HRKLGIEEPKK

SEQ ID NO: 104 - protein, 11 aa, Artificial
  IGFBP-2 heparin binding domain-containing peptide sequence
KHRLGIEEPKK

SEQ ID NO: 105 - protein, 11 aa, Artificial
  IGFBP-2 heparin binding domain-containing peptide sequence
RHRLGIEEPKK

SEQ ID NO: 106 - protein, 11 aa, Artificial
  IGFBP-2 heparin binding domain-containing peptide sequence
HHRLGIEEPKK

SEQ ID NO: 107 - protein, 11 aa, Artificial
  IGFBP-2 heparin binding domain-containing peptide sequence
KKRLGIEEPKK

SEQ ID NO: 108 - protein, 11 aa, Artificial
  IGFBP-2 heparin binding domain-containing peptide sequence
RKRLGIEEPKK

SEQ ID NO: 109 - protein, 11 aa, Artificial
  IGFBP-2 heparin binding domain-containing peptide sequence
HKRLGIEEPKK

SEQ ID NO: 110 - protein, 11 aa, Artificial
  IGFBP-2 heparin binding domain-containing peptide sequence
KRRLGIEEPKK

SEQ ID NO: 111 - protein, 11 aa, Artificial
  IGFBP-2 heparin binding domain-containing peptide sequence
RRRLGIEEPKK

SEQ ID NO: 112 - protein, 11 aa, Artificial
  IGFBP-2 heparin binding domain-containing peptide sequence
HRRLGIEEPKK

SEQ ID NO: 113 - protein, 11 aa, Artificial
  IGFBP-2 heparin binding domain-containing peptide sequence
KHHIGIEEPKK

SEQ ID NO: 114 - protein, 11 aa, Artificial
  IGFBP-2 heparin binding domain-containing peptide sequence
RHHIGIEEPKK

SEQ ID NO: 115 - protein, 11 aa, Artificial
  IGFBP-2 heparin binding domain-containing peptide sequence
HHHIGIEEPKK

SEQ ID NO: 116 - protein, 11 aa, Artificial
  IGFBP-2 heparin binding domain-containing peptide sequence
KKHIGIEEPKK

SEQ ID NO: 117 - protein, 11 aa, Artificial
  IGFBP-2 heparin binding domain-containing peptide sequence
RKHIGIEEPKK

SEQ ID NO: 118 - protein, 11 aa, Artificial
  IGFBP-2 heparin binding domain-containing peptide sequence
HKHIGIEEPKK

SEQ ID NO: 119 - protein, 11 aa, Artificial
  IGFBP-2 heparin binding domain-containing peptide sequence
KRHIGIEEPKK

SEQ ID NO: 120 - protein, 11 aa, Artificial
  IGFBP-2 heparin binding domain-containing peptide sequence
RRHIGIEEPKK

SEQ ID NO: 121 - protein, 11 aa, Artificial
  IGFBP-2 heparin binding domain-containing peptide sequence
HRHIGIEEPKK

SEQ ID NO: 122 - protein, 11 aa, Artificial
  IGFBP-2 heparin binding domain-containing peptide sequence
KHKIGIEEPKK

SEQ ID NO: 123 - protein, 11 aa, Artificial
  IGFBP-2 heparin binding domain-containing peptide sequence
RHKIGIEEPKK

SEQ ID NO: 124 - protein, 11 aa, Artificial
  IGFBP-2 heparin binding domain-containing peptide sequence
HHKIGIEEPKK

SEQ ID NO: 125 - protein, 11 aa, Artificial
  IGFBP-2 heparin binding domain-containing peptide sequence
KKKIGIEEPKK

SEQ ID NO: 126 - protein, 11 aa, Artificial
  IGFBP-2 heparin binding domain-containing peptide sequence
RKKIGIEEPKK

SEQ ID NO: 127 - protein, 11 aa, Artificial
  IGFBP-2 heparin binding domain-containing peptide sequence
HKKIGIEEPKK

SEQ ID NO: 128 - protein, 11 aa, Artificial
  IGFBP-2 heparin binding domain-containing peptide sequence
KRKIGIEEPKK

SEQ ID NO: 129 - protein, 11 aa, Artificial
  IGFBP-2 heparin binding domain-containing peptide sequence
RRKIGIEEPKK

SEQ ID NO: 130 - protein, 11 aa, Artificial
  IGFBP-2 heparin binding domain-containing peptide sequence
HRKIGIEEPKK

SEQ ID NO: 131 - protein, 11 aa, Artificial
  IGFBP-2 heparin binding domain-containing peptide sequence
KHRIGIEEPKK

SEQ ID NO: 132 - protein, 11 aa, Artificial
  IGFBP-2 heparin binding domain-containing peptide sequence
RHRIGIEEPKK

SEQ ID NO: 133 - protein, 11 aa, Artificial
  IGFBP-2 heparin binding domain-containing peptide sequence
HHRIGIEEPKK

SEQ ID NO: 134 - protein, 11 aa, Artificial
  IGFBP-2 heparin binding domain-containing peptide sequence
KKRIGIEEPKK

SEQ ID NO: 135 - protein, 11 aa, Artificial
  IGFBP-2 heparin binding domain-containing peptide sequence
RKRIGIEEPKK

SEQ ID NO: 136 - protein, 11 aa, Artificial
  IGFBP-2 heparin binding domain-containing peptide sequence
HKRIGIEEPKK

SEQ ID NO: 137 - protein, 11 aa, Artificial
  IGFBP-2 heparin binding domain-containing peptide sequence
KRRIGIEEPKK

SEQ ID NO: 138 - protein, 11 aa, Artificial
  IGFBP-2 heparin binding domain-containing peptide sequence
RRRIGIEEPKK

SEQ ID NO: 139 - protein, 11 aa, Artificial
  IGFBP-2 heparin binding domain-containing peptide sequence
HRRIGIEEPKK

SEQ ID NO: 140 - protein, 11 aa, Artificial
  IGFBP-2 heparin binding domain-containing peptide sequence
KHHVGIEEPKK

SEQ ID NO: 141 - protein, 11 aa, Artificial
  IGFBP-2 heparin binding domain-containing peptide sequence
RHHVGIEEPKK

SEQ ID NO: 142 - protein, 11 aa, Artificial
  IGFBP-2 heparin binding domain-containing peptide sequence
HHHVGIEEPKK

SEQ ID NO: 143 - protein, 11 aa, Artificial
  IGFBP-2 heparin binding domain-containing peptide sequence
KKHVGIEEPKK

SEQ ID NO: 144 - protein, 11 aa, Artificial
  IGFBP-2 heparin binding domain-containing peptide sequence
RKHVGIEEPKK

SEQ ID NO: 145 - protein, 11 aa, Artificial
  IGFBP-2 heparin binding domain-containing peptide sequence
HKHVGIEEPKK

SEQ ID NO: 146 - protein, 11 aa, Artificial
  IGFBP-2 heparin binding domain-containing peptide sequence
KRHVGIEEPKK

SEQ ID NO: 147 - protein, 11 aa, Artificial
  IGFBP-2 heparin binding domain-containing peptide sequence
RRHVGIEEPKK

SEQ ID NO: 148 - protein, 11 aa, Artificial
  IGFBP-2 heparin binding domain-containing peptide sequence
HRHVGIEEPKK

SEQ ID NO: 149 - protein, 11 aa, Artificial
  IGFBP-2 heparin binding domain-containing peptide sequence
KHKVGIEEPKK

SEQ ID NO: 150 - protein, 11 aa, Artificial
  IGFBP-2 heparin binding domain-containing peptide sequence
RHKVGIEEPKK

SEQ ID NO: 151 - protein, 11 aa, Artificial
  IGFBP-2 heparin binding domain-containing peptide sequence
HHKVGIEEPKK

SEQ ID NO: 152 - protein, 11 aa, Artificial
  IGFBP-2 heparin binding domain-containing peptide sequence
KKKVGIEEPKK

SEQ ID NO: 153 - protein, 11 aa, Artificial
  IGFBP-2 heparin binding domain-containing peptide sequence
RKKVGIEEPKK

SEQ ID NO: 154 - protein, 11 aa, Artificial
  IGFBP-2 heparin binding domain-containing peptide sequence
HKKVGIEEPKK

SEQ ID NO: 155 - protein, 11 aa, Artificial
  IGFBP-2 heparin binding domain-containing peptide sequence
KRKVGIEEPKK

SEQ ID NO: 156 - protein, 11 aa, Artificial
  IGFBP-2 heparin binding domain-containing peptide sequence
RRKVGIEEPKK

SEQ ID NO: 157 - protein, 11 aa, Artificial
  IGFBP-2 heparin binding domain-containing peptide sequence
HRKVGIEEPKK

SEQ ID NO: 158 - protein, 11 aa, Artificial
  IGFBP-2 heparin binding domain-containing peptide sequence
KHRVGIEEPKK

SEQ ID NO: 159 - protein, 11 aa, Artificial
  IGFBP-2 heparin binding domain-containing peptide sequence
RHRVGIEEPKK

SEQ ID NO: 160 - protein, 11 aa, Artificial
  IGFBP-2 heparin binding domain-containing peptide sequence
HHRVGIEEPKK

SEQ ID NO: 161 - protein, 11 aa, Artificial
  IGFBP-2 heparin binding domain-containing peptide sequence
KKRVGIEEPKK

SEQ ID NO: 162 - protein, 11 aa, Artificial
  IGFBP-2 heparin binding domain-containing peptide sequence
RKRVGIEEPKK

SEQ ID NO: 163 - protein, 11 aa, Artificial
  IGFBP-2 heparin binding domain-containing peptide sequence
HKRVGIEEPKK

SEQ ID NO: 164 - protein, 11 aa, Artificial
  IGFBP-2 heparin binding domain-containing peptide sequence
KRRVGIEEPKK

SEQ ID NO: 165 - protein, 11 aa, Artificial
  IGFBP-2 heparin binding domain-containing peptide sequence
RRRVGIEEPKK

SEQ ID NO: 166 - protein, 11 aa, Artificial
  IGFBP-2 heparin binding domain-containing peptide sequence
HRRVGIEEPKK

SEQ ID NO: 167 - protein, 11 aa, Artificial
  IGFBP-2 heparin binding domain-containing peptide sequence
KHHLGVEEPKK

SEQ ID NO: 168 - protein, 11 aa, Artificial
  IGFBP-2 heparin binding domain-containing peptide sequence
RHHLGVEEPKK

SEQ ID NO: 169 - protein, 11 aa, Artificial
  IGFBP-2 heparin binding domain-containing peptide sequence
HHHLGVEEPKK

SEQ ID NO: 170 - protein, 11 aa, Artificial
  IGFBP-2 heparin binding domain-containing peptide sequence
KKHLGVEEPKK

SEQ ID NO: 171 - protein, 11 aa, Artificial
  IGFBP-2 heparin binding domain-containing peptide sequence
RKHLGVEEPKK

SEQ ID NO: 172 - protein, 11 aa, Artificial
  IGFBP-2 heparin binding domain-containing peptide sequence
HKHLGVEEPKK

SEQ ID NO: 173 - protein, 11 aa, Artificial
  IGFBP-2 heparin binding domain-containing peptide sequence
KRHLGVEEPKK

SEQ ID NO: 174 - protein, 11 aa, Artificial
  IGFBP-2 heparin binding domain-containing peptide sequence
RRHLGVEEPKK

SEQ ID NO: 175 - protein, 11 aa, Artificial
  IGFBP-2 heparin binding domain-containing peptide sequence
HRHLGVEEPKK

SEQ ID NO: 176 - protein, 11 aa, Artificial
  IGFBP-2 heparin binding domain-containing peptide sequence
KHKLGVEEPKK

SEQ ID NO: 177 - protein, 11 aa, Artificial
  IGFBP-2 heparin binding domain-containing peptide sequence
RHKLGVEEPKK

SEQ ID NO: 178 - protein, 11 aa, Artificial
  IGFBP-2 heparin binding domain-containing peptide sequence
HHKLGVEEPKK

SEQ ID NO: 179 - protein, 11 aa, Artificial
  IGFBP-2 heparin binding domain-containing peptide sequence
KKKLGVEEPKK

SEQ ID NO: 180 - protein, 11 aa, Artificial
  IGFBP-2 heparin binding domain-containing peptide sequence
RKKLGVEEPKK

SEQ ID NO: 181 - protein, 11 aa, Artificial
  IGFBP-2 heparin binding domain-containing peptide sequence
HKKLGVEEPKK

SEQ ID NO: 182 - protein, 11 aa, Artificial
  IGFBP-2 heparin binding domain-containing peptide sequence
KRKLGVEEPKK

SEQ ID NO: 183 - protein, 11 aa, Artificial
  IGFBP-2 heparin binding domain-containing peptide sequence
RRKLGVEEPKK

SEQ ID NO: 184 - protein, 11 aa, Artificial
  IGFBP-2 heparin binding domain-containing peptide sequence
HRKLGVEEPKK

SEQ ID NO: 185 - protein, 11 aa, Artificial
  IGFBP-2 heparin binding domain-containing peptide sequence
KHRLGVEEPKK

SEQ ID NO: 186 - protein, 11 aa, Artificial
  IGFBP-2 heparin binding domain-containing peptide sequence
RHRLGVEEPKK

SEQ ID NO: 187 - protein, 11 aa, Artificial
  IGFBP-2 heparin binding domain-containing peptide sequence
HHRLGVEEPKK

SEQ ID NO: 188 - protein, 11 aa, Artificial
  IGFBP-2 heparin binding domain-containing peptide sequence
KKRLGVEEPKK

SEQ ID NO: 189 - protein, 11 aa, Artificial
  IGFBP-2 heparin binding domain-containing peptide sequence
RKRLGVEEPKK

SEQ ID NO: 190 - protein, 11 aa, Artificial
  IGFBP-2 heparin binding domain-containing peptide sequence
HKRLGVEEPKK

SEQ ID NO: 191 - protein, 11 aa, Artificial
  IGFBP-2 heparin binding domain-containing peptide sequence
KRRLGVEEPKK

SEQ ID NO: 192 - protein, 11 aa, Artificial
  IGFBP-2 heparin binding domain-containing peptide sequence
RRRLGVEEPKK

SEQ ID NO: 193 - protein, 11 aa, Artificial
  IGFBP-2 heparin binding domain-containing peptide sequence
HRRLGVEEPKK

SEQ ID NO: 194 - protein, 11 aa, Artificial
  IGFBP-2 heparin binding domain-containing peptide sequence
KHHIGVEEPKK

SEQ ID NO: 195 - protein, 11 aa, Artificial
  IGFBP-2 heparin binding domain-containing peptide sequence
RHHIGVEEPKK

SEQ ID NO: 196 - protein, 11 aa, Artificial
  IGFBP-2 heparin binding domain-containing peptide sequence
HHHIGVEEPKK

SEQ ID NO: 197 - protein, 11 aa, Artificial
  IGFBP-2 heparin binding domain-containing peptide sequence
KKHIGVEEPKK

SEQ ID NO: 198 - protein, 11 aa, Artificial
  IGFBP-2 heparin binding domain-containing peptide sequence
RKHIGVEEPKK

SEQ ID NO: 199 - protein, 11 aa, Artificial
  IGFBP-2 heparin binding domain-containing peptide sequence
HKHIGVEEPKK

SEQ ID NO: 200 - protein, 11 aa, Artificial
  IGFBP-2 heparin binding domain-containing peptide sequence
KRHIGVEEPKK

SEQ ID NO: 201 - protein, 11 aa, Artificial
  IGFBP-2 heparin binding domain-containing peptide sequence
RRHIGVEEPKK

SEQ ID NO: 202 - protein, 11 aa, Artificial
  IGFBP-2 heparin binding domain-containing peptide sequence
HRHIGVEEPKK

SEQ ID NO: 203 - protein, 11 aa, Artificial
  IGFBP-2 heparin binding domain-containing peptide sequence
KHKIGVEEPKK

SEQ ID NO: 204 - protein, 11 aa, Artificial
  IGFBP-2 heparin binding domain-containing peptide sequence
RHKIGVEEPKK

SEQ ID NO: 205 - protein, 11 aa, Artificial
  IGFBP-2 heparin binding domain-containing peptide sequence
HHKIGVEEPKK

SEQ ID NO: 206 - protein, 11 aa, Artificial
  IGFBP-2 heparin binding domain-containing peptide sequence
KKKIGVEEPKK

SEQ ID NO: 207 - protein, 11 aa, Artificial
  IGFBP-2 heparin binding domain-containing peptide sequence
RKKIGVEEPKK

SEQ ID NO: 208 - protein, 11 aa, Artificial
  IGFBP-2 heparin binding domain-containing peptide sequence
HKKIGVEEPKK

SEQ ID NO: 209 - protein, 11 aa, Artificial
  IGFBP-2 heparin binding domain-containing peptide sequence
KRKIGVEEPKK

SEQ ID NO: 210 - protein, 11 aa, Artificial
  IGFBP-2 heparin binding domain-containing peptide sequence
RRKIGVEEPKK

SEQ ID NO: 211 - protein, 11 aa, Artificial
  IGFBP-2 heparin binding domain-containing peptide sequence
HRKIGVEEPKK

SEQ ID NO: 212 - protein, 11 aa, Artificial
  IGFBP-2 heparin binding domain-containing peptide sequence
KHRIGVEEPKK

SEQ ID NO: 213 - protein, 11 aa, Artificial
  IGFBP-2 heparin binding domain-containing peptide sequence
RHRIGVEEPKK

SEQ ID NO: 214 - protein, 11 aa, Artificial
  IGFBP-2 heparin binding domain-containing peptide sequence
HHRIGVEEPKK

SEQ ID NO: 215 - protein, 11 aa, Artificial
  IGFBP-2 heparin binding domain-containing peptide sequence
KKRIGVEEPKK

SEQ ID NO: 216 - protein, 11 aa, Artificial
  IGFBP-2 heparin binding domain-containing peptide sequence
RKRIGVEEPKK

SEQ ID NO: 217 - protein, 11 aa, Artificial
  IGFBP-2 heparin binding domain-containing peptide sequence
HKRIGVEEPKK

SEQ ID NO: 218 - protein, 11 aa, Artificial
  IGFBP-2 heparin binding domain-containing peptide sequence
KRRIGVEEPKK

SEQ ID NO: 219 - protein, 11 aa, Artificial
  IGFBP-2 heparin binding domain-containing peptide sequence
RRRIGVEEPKK

SEQ ID NO: 220 - protein, 11 aa, Artificial
  IGFBP-2 heparin binding domain-containing peptide sequence
HRRIGVEEPKK

SEQ ID NO: 221 - protein, 11 aa, Artificial
  IGFBP-2 heparin binding domain-containing peptide sequence
KHHVGVEEPKK

SEQ ID NO: 222 - protein, 11 aa, Artificial
  IGFBP-2 heparin binding domain-containing peptide sequence
RHHVGVEEPKK

SEQ ID NO: 223 - protein, 11 aa, Artificial
  IGFBP-2 heparin binding domain-containing peptide sequence
HHHVGVEEPKK

SEQ ID NO: 224 - protein, 11 aa, Artificial
  IGFBP-2 heparin binding domain-containing peptide sequence
KKHVGVEEPKK

SEQ ID NO: 225 - protein, 11 aa, Artificial
  IGFBP-2 heparin binding domain-containing peptide sequence
RKHVGVEEPKK

SEQ ID NO: 226 - protein, 11 aa, Artificial
  IGFBP-2 heparin binding domain-containing peptide sequence
HKHVGVEEPKK

SEQ ID NO: 227 - protein, 11 aa, Artificial
  IGFBP-2 heparin binding domain-containing peptide sequence
KRHVGVEEPKK

SEQ ID NO: 228 - protein, 11 aa, Artificial
  IGFBP-2 heparin binding domain-containing peptide sequence
RRHVGVEEPKK

SEQ ID NO: 229 - protein, 11 aa, Artificial
  IGFBP-2 heparin binding domain-containing peptide sequence
HRHVGVEEPKK

SEQ ID NO: 230 - protein, 11 aa, Artificial
  IGFBP-2 heparin binding domain-containing peptide sequence
KHKVGVEEPKK

SEQ ID NO: 231 - protein, 11 aa, Artificial
  IGFBP-2 heparin binding domain-containing peptide sequence
RHKVGVEEPKK

SEQ ID NO: 232 - protein, 11 aa, Artificial
  IGFBP-2 heparin binding domain-containing peptide sequence
HHKVGVEEPKK

SEQ ID NO: 233 - protein, 11 aa, Artificial
  IGFBP-2 heparin binding domain-containing peptide sequence
KKKVGVEEPKK

SEQ ID NO: 234 - protein, 11 aa, Artificial
  IGFBP-2 heparin binding domain-containing peptide sequence
RKKVGVEEPKK

SEQ ID NO: 235 - protein, 11 aa, Artificial
  IGFBP-2 heparin binding domain-containing peptide sequence
HKKVGVEEPKK

SEQ ID NO: 236 - protein, 11 aa, Artificial
  IGFBP-2 heparin binding domain-containing peptide sequence
KRKVGVEEPKK

SEQ ID NO: 237 - protein, 11 aa, Artificial
  IGFBP-2 heparin binding domain-containing peptide sequence
RRKVGVEEPKK

SEQ ID NO: 238 - protein, 11 aa, Artificial
  IGFBP-2 heparin binding domain-containing peptide sequence
HRKVGVEEPKK

SEQ ID NO: 239 - protein, 11 aa, Artificial
  IGFBP-2 heparin binding domain-containing peptide sequence
KHRVGVEEPKK

SEQ ID NO: 240 - protein, 11 aa, Artificial
  IGFBP-2 heparin binding domain-containing peptide sequence
RHRVGVEEPKK

SEQ ID NO: 241 - protein, 11 aa, Artificial
  IGFBP-2 heparin binding domain-containing peptide sequence
HHRVGVEEPKK

SEQ ID NO: 242 - protein, 11 aa, Artificial
  IGFBP-2 heparin binding domain-containing peptide sequence
KKRVGVEEPKK

SEQ ID NO: 243 - protein, 11 aa, Artificial
  IGFBP-2 heparin binding domain-containing peptide sequence
RKRVGVEEPKK

SEQ ID NO: 244 - protein, 11 aa, Artificial
  IGFBP-2 heparin binding domain-containing peptide sequence
HKRVGVEEPKK

SEQ ID NO: 245 - protein, 11 aa, Artificial
  IGFBP-2 heparin binding domain-containing peptide sequence
KRRVGVEEPKK

SEQ ID NO: 246 - protein, 11 aa, Artificial
  IGFBP-2 heparin binding domain-containing peptide sequence
RRRVGVEEPKK

SEQ ID NO: 247 - protein, 11 aa, Artificial
  IGFBP-2 heparin binding domain-containing peptide sequence
HRRVGVEEPKK

SEQ ID NO: 248 - protein, 11 aa, Artificial
  IGFBP-2 heparin binding domain-containing peptide sequence
KHHLGLNEPKK

SEQ ID NO: 249 - protein, 11 aa, Artificial
  IGFBP-2 heparin binding domain-containing peptide sequence
RHHLGLNEPKK

SEQ ID NO: 250 - protein, 11 aa, Artificial
  IGFBP-2 heparin binding domain-containing peptide sequence
HHHLGLNEPKK

SEQ ID NO: 251 - protein, 11 aa, Artificial
  IGFBP-2 heparin binding domain-containing peptide sequence
KKHLGLNEPKK

SEQ ID NO: 252 - protein, 11 aa, Artificial
  IGFBP-2 heparin binding domain-containing peptide sequence
RKHLGLNEPKK

SEQ ID NO: 253 - protein, 11 aa, Artificial
  IGFBP-2 heparin binding domain-containing peptide sequence
HKHLGLNEPKK

SEQ ID NO: 254 - protein, 11 aa, Artificial
  IGFBP-2 heparin binding domain-containing peptide sequence
KRHLGLNEPKK

SEQ ID NO: 255 - protein, 11 aa, Artificial
  IGFBP-2 heparin binding domain-containing peptide sequence
RRHLGLNEPKK

SEQ ID NO: 256 - protein, 11 aa, Artificial
  IGFBP-2 heparin binding domain-containing peptide sequence
HRHLGLNEPKK

SEQ ID NO: 257 - protein, 11 aa, Artificial
  IGFBP-2 heparin binding domain-containing peptide sequence
KHKLGLNEPKK

SEQ ID NO: 258 - protein, 11 aa, Artificial
  IGFBP-2 heparin binding domain-containing peptide sequence
RHKLGLNEPKK

SEQ ID NO: 259 - protein, 11 aa, Artificial
  IGFBP-2 heparin binding domain-containing peptide sequence
HHKLGLNEPKK

SEQ ID NO: 260 - protein, 11 aa, Artificial
  IGFBP-2 heparin binding domain-containing peptide sequence
KKKLGLNEPKK

SEQ ID NO: 261 - protein, 11 aa, Artificial
  IGFBP-2 heparin binding domain-containing peptide sequence
RKKLGLNEPKK

SEQ ID NO: 262 - protein, 11 aa, Artificial
  IGFBP-2 heparin binding domain-containing peptide sequence
HKKLGLNEPKK

SEQ ID NO: 263 - protein, 11 aa, Artificial
  IGFBP-2 heparin binding domain-containing peptide sequence
KRKLGLNEPKK

SEQ ID NO: 264 - protein, 11 aa, Artificial
  IGFBP-2 heparin binding domain-containing peptide sequence
RRKLGLNEPKK

SEQ ID NO: 265 - protein, 11 aa, Artificial
  IGFBP-2 heparin binding domain-containing peptide sequence
HRKLGLNEPKK

SEQ ID NO: 266 - protein, 11 aa, Artificial
  IGFBP-2 heparin binding domain-containing peptide sequence
KHRLGLNEPKK

SEQ ID NO: 267 - protein, 11 aa, Artificial
  IGFBP-2 heparin binding domain-containing peptide sequence
RHRLGLNEPKK

SEQ ID NO: 268 - protein, 11 aa, Artificial
  IGFBP-2 heparin binding domain-containing peptide sequence
HHRLGLNEPKK

SEQ ID NO: 269 - protein, 11 aa, Artificial
  IGFBP-2 heparin binding domain-containing peptide sequence
KKRLGLNEPKK

SEQ ID NO: 270 - protein, 11 aa, Artificial
  IGFBP-2 heparin binding domain-containing peptide sequence
RKRLGLNEPKK

SEQ ID NO: 271 - protein, 11 aa, Artificial
  IGFBP-2 heparin binding domain-containing peptide sequence
HKRLGLNEPKK

SEQ ID NO: 272 - protein, 11 aa, Artificial
  IGFBP-2 heparin binding domain-containing peptide sequence
KRRLGLNEPKK

SEQ ID NO: 273 - protein, 11 aa, Artificial
  IGFBP-2 heparin binding domain-containing peptide sequence
RRRLGLNEPKK

SEQ ID NO: 274 - protein, 11 aa, Artificial
  IGFBP-2 heparin binding domain-containing peptide sequence
HRRLGLNEPKK

SEQ ID NO: 275 - protein, 10 aa, Artificial
  IGFBP-2 heparin binding domain-containing peptide sequence
KHHIGLNPKK

SEQ ID NO: 276 - protein, 11 aa, Artificial
  IGFBP-2 heparin binding domain-containing peptide sequence
RHHIGLNEPKK

SEQ ID NO: 277 - protein, 11 aa, Artificial
  IGFBP-2 heparin binding domain-containing peptide sequence
HHHIGLNEPKK

SEQ ID NO: 278 - protein, 11 aa, Artificial
  IGFBP-2 heparin binding domain-containing peptide sequence
KKHIGLNEPKK

SEQ ID NO: 279 - protein, 11 aa, Artificial
  IGFBP-2 heparin binding domain-containing peptide sequence
RKHIGLNEPKK

SEQ ID NO: 280 - protein, 11 aa, Artificial
  IGFBP-2 heparin binding domain-containing peptide sequence
HKHIGLNEPKK

SEQ ID NO: 281 - protein, 11 aa, Artificial
  IGFBP-2 heparin binding domain-containing peptide sequence
KRHIGLNEPKK

SEQ ID NO: 282 - protein, 11 aa, Artificial
  IGFBP-2 heparin binding domain-containing peptide sequence
RRHIGLNEPKK

SEQ ID NO: 283 - protein, 11 aa, Artificial
  IGFBP-2 heparin binding domain-containing peptide sequence
HRHIGLNEPKK

SEQ ID NO: 284 - protein, 11 aa, Artificial
  IGFBP-2 heparin binding domain-containing peptide sequence
KHKIGLNEPKK

SEQ ID NO: 285 - protein, 11 aa, Artificial
  IGFBP-2 heparin binding domain-containing peptide sequence
RHKIGLNEPKK

SEQ ID NO: 286 - protein, 11 aa, Artificial
  IGFBP-2 heparin binding domain-containing peptide sequence
HHKIGLNEPKK

SEQ ID NO: 287 - protein, 11 aa, Artificial
  IGFBP-2 heparin binding domain-containing peptide sequence
KKKIGLNEPKK

SEQ ID NO: 288 - protein, 11 aa, Artificial
  IGFBP-2 heparin binding domain-containing peptide sequence
RKKIGLNEPKK

SEQ ID NO: 289 - protein, 11 aa, Artificial
  IGFBP-2 heparin binding domain-containing peptide sequence
HKKIGLNEPKK

SEQ ID NO: 290 - protein, 11 aa, Artificial
  IGFBP-2 heparin binding domain-containing peptide sequence
KRKIGLNEPKK

SEQ ID NO: 291 - protein, 11 aa, Artificial
  IGFBP-2 heparin binding domain-containing peptide sequence
RRKIGLNEPKK

SEQ ID NO: 292 - protein, 11 aa, Artificial
  IGFBP-2 heparin binding domain-containing peptide sequence
HRKIGLNEPKK

SEQ ID NO: 293 - protein, 11 aa, Artificial
  IGFBP-2 heparin binding domain-containing peptide sequence
KHRIGLNEPKK

SEQ ID NO: 294 - protein, 11 aa, Artificial
  IGFBP-2 heparin binding domain-containing peptide sequence
RHRIGLNEPKK

SEQ ID NO: 295 - protein, 11 aa, Artificial
  IGFBP-2 heparin binding domain-containing peptide sequence
HHRIGLNEPKK

SEQ ID NO: 296 - protein, 11 aa, Artificial
  IGFBP-2 heparin binding domain-containing peptide sequence
KKRIGLNEPKK

SEQ ID NO: 297 - protein, 11 aa, Artificial
  IGFBP-2 heparin binding domain-containing peptide sequence
RKRIGLNEPKK

SEQ ID NO: 298 - protein, 11 aa, Artificial
  IGFBP-2 heparin binding domain-containing peptide sequence
HKRIGLNEPKK

SEQ ID NO: 299 - protein, 11 aa, Artificial
  IGFBP-2 heparin binding domain-containing peptide sequence
KRRIGLNEPKK

SEQ ID NO: 300 - protein, 11 aa, Artificial
  IGFBP-2 heparin binding domain-containing peptide sequence
RRRIGLNEPKK

SEQ ID NO: 301 - protein, 11 aa, Artificial
  IGFBP-2 heparin binding domain-containing peptide sequence
HRRIGLNEPKK

SEQ ID NO: 302 - protein, 11 aa, Artificial
  IGFBP-2 heparin binding domain-containing peptide sequence
KHHVGLNEPKK

SEQ ID NO: 303 - protein, 11 aa, Artificial
  IGFBP-2 heparin binding domain-containing peptide sequence
RHHVGLNEPKK

SEQ ID NO: 304 - protein, 11 aa, Artificial
  IGFBP-2 heparin binding domain-containing peptide sequence
HHHVGLNEPKK

SEQ ID NO: 305 - protein, 11 aa, Artificial
  IGFBP-2 heparin binding domain-containing peptide sequence
KKHVGLNEPKK

SEQ ID NO: 306 - protein, 11 aa, Artificial
  IGFBP-2 heparin binding domain-containing peptide sequence
RKHVGLNEPKK

SEQ ID NO: 307 - protein, 11 aa, Artificial
  IGFBP-2 heparin binding domain-containing peptide sequence
HKHVGLNEPKK

SEQ ID NO: 308 - protein, 11 aa, Artificial
  IGFBP-2 heparin binding domain-containing peptide sequence
KRHVGLNEPKK

SEQ ID NO: 309 - protein, 11 aa, Artificial
  IGFBP-2 heparin binding domain-containing peptide sequence
RRHVGLNEPKK

SEQ ID NO: 310 - protein, 11 aa, Artificial
  IGFBP-2 heparin binding domain-containing peptide sequence
HRHVGLNEPKK

SEQ ID NO: 311 - protein, 11 aa, Artificial
  IGFBP-2 heparin binding domain-containing peptide sequence
KHKVGLNEPKK

SEQ ID NO: 312 - protein, 11 aa, Artificial
  IGFBP-2 heparin binding domain-containing peptide sequence
RHKVGLNEPKK

SEQ ID NO: 313 - protein, 11 aa, Artificial
  IGFBP-2 heparin binding domain-containing peptide sequence
HHKVGLNEPKK

SEQ ID NO: 314 - protein, 11 aa, Artificial
  IGFBP-2 heparin binding domain-containing peptide sequence
KKKVGLNEPKK

SEQ ID NO: 315 - protein, 11 aa, Artificial
  IGFBP-2 heparin binding domain-containing peptide sequence
RKKVGLNEPKK

SEQ ID NO: 316 - protein, 11 aa, Artificial
  IGFBP-2 heparin binding domain-containing peptide sequence
HKKVGLNEPKK

SEQ ID NO: 317 - protein, 11 aa, Artificial
  IGFBP-2 heparin binding domain-containing peptide sequence
KRKVGLNEPKK

SEQ ID NO: 318 - protein, 11 aa, Artificial
  IGFBP-2 heparin binding domain-containing peptide sequence
RRKVGLNEPKK

SEQ ID NO: 319 - protein, 11 aa, Artificial
  IGFBP-2 heparin binding domain-containing peptide sequence
HRKVGLNEPKK

SEQ ID NO: 320 - protein, 11 aa, Artificial
  IGFBP-2 heparin binding domain-containing peptide sequence
KHRVGLNEPKK

SEQ ID NO: 321 - protein, 11 aa, Artificial
  IGFBP-2 heparin binding domain-containing peptide sequence
RHRVGLNEPKK

SEQ ID NO: 322 - protein, 11 aa, Artificial
  IGFBP-2 heparin binding domain-containing peptide sequence
HHRVGLNEPKK

SEQ ID NO: 323 - protein, 11 aa, Artificial
  IGFBP-2 heparin binding domain-containing peptide sequence
KKRVGLNEPKK

SEQ ID NO: 324 - protein, 11 aa, Artificial
  IGFBP-2 heparin binding domain-containing peptide sequence
RKRVGLNEPKK

SEQ ID NO: 325 - protein, 11 aa, Artificial
  IGFBP-2 heparin binding domain-containing peptide sequence
HKRVGLNEPKK

SEQ ID NO: 326 - protein, 11 aa, Artificial
  IGFBP-2 heparin binding domain-containing peptide sequence
KRRVGLNEPKK

SEQ ID NO: 327 - protein, 11 aa, Artificial
  IGFBP-2 heparin binding domain-containing peptide sequence
RRRVGLNEPKK

SEQ ID NO: 328 - protein, 11 aa, Artificial
  IGFBP-2 heparin binding domain-containing peptide sequence
HRRVGLNEPKK

SEQ ID NO: 329 - protein, 11 aa, Artificial
  IGFBP-2 heparin binding domain-containing peptide sequence
KHHLGINEPKK

SEQ ID NO: 330 - protein, 11 aa, Artificial
  IGFBP-2 heparin binding domain-containing peptide sequence
RHHLGINEPKK

SEQ ID NO: 331 - protein, 11 aa, Artificial
  IGFBP-2 heparin binding domain-containing peptide sequence
HHHLGINEPKK

SEQ ID NO: 332 - protein, 11 aa, Artificial
  IGFBP-2 heparin binding domain-containing peptide sequence
KKHLGINEPKK

SEQ ID NO: 333 - protein, 11 aa, Artificial
  IGFBP-2 heparin binding domain-containing peptide sequence
RKHLGINEPKK

SEQ ID NO: 334 - protein, 11 aa, Artificial
  IGFBP-2 heparin binding domain-containing peptide sequence
HKHLGINEPKK

SEQ ID NO: 335 - protein, 11 aa, Artificial
  IGFBP-2 heparin binding domain-containing peptide sequence
KRHLGINEPKK

SEQ ID NO: 336 - protein, 11 aa, Artificial
  IGFBP-2 heparin binding domain-containing peptide sequence
RRHLGINEPKK

SEQ ID NO: 337 - protein, 11 aa, Artificial
  IGFBP-2 heparin binding domain-containing peptide sequence
HRHLGINEPKK

SEQ ID NO: 338 - protein, 11 aa, Artificial
  IGFBP-2 heparin binding domain-containing peptide sequence
KHKLGINEPKK

SEQ ID NO: 339 - protein, 11 aa, Artificial
  IGFBP-2 heparin binding domain-containing peptide sequence
RHKLGINEPKK

SEQ ID NO: 340 - protein, 11 aa, Artificial
  IGFBP-2 heparin binding domain-containing peptide sequence
HHKLGINEPKK

SEQ ID NO: 341 - protein, 11 aa, Artificial
  IGFBP-2 heparin binding domain-containing peptide sequence
KKKLGINEPKK

SEQ ID NO: 342 - protein, 11 aa, Artificial
  IGFBP-2 heparin binding domain-containing peptide sequence
RKKLGINEPKK

SEQ ID NO: 343 - protein, 11 aa, Artificial
  IGFBP-2 heparin binding domain-containing peptide sequence
HKKLGINEPKK

SEQ ID NO: 344 - protein, 11 aa, Artificial
  IGFBP-2 heparin binding domain-containing peptide sequence
KRKLGINEPKK

SEQ ID NO: 345 - protein, 11 aa, Artificial
  IGFBP-2 heparin binding domain-containing peptide sequence
RRKLGINEPKK

SEQ ID NO: 346 - protein, 11 aa, Artificial
  IGFBP-2 heparin binding domain-containing peptide sequence
HRKLGINEPKK

SEQ ID NO: 347 - protein, 11 aa, Artificial
  IGFBP-2 heparin binding domain-containing peptide sequence
KHRLGINEPKK

SEQ ID NO: 348 - protein, 11 aa, Artificial
  IGFBP-2 heparin binding domain-containing peptide sequence
RHRLGINEPKK

SEQ ID NO: 349 - protein, 11 aa, Artificial
  IGFBP-2 heparin binding domain-containing peptide sequence
HHRLGINEPKK

SEQ ID NO: 350 - protein, 11 aa, Artificial
  IGFBP-2 heparin binding domain-containing peptide sequence
KKRLGINEPKK

SEQ ID NO: 351 - protein, 11 aa, Artificial
  IGFBP-2 heparin binding domain-containing peptide sequence
RKRLGINEPKK

SEQ ID NO: 352 - protein, 11 aa, Artificial
  IGFBP-2 heparin binding domain-containing peptide sequence
HKRLGINEPKK

SEQ ID NO: 353 - protein, 11 aa, Artificial
  IGFBP-2 heparin binding domain-containing peptide sequence
KRRLGINEPKK

SEQ ID NO: 354 - protein, 11 aa, Artificial
  IGFBP-2 heparin binding domain-containing peptide sequence
RRRLGINEPKK

SEQ ID NO: 355 - protein, 11 aa, Artificial
  IGFBP-2 heparin binding domain-containing peptide sequence
HRRLGINEPKK

SEQ ID NO: 356 - protein, 11 aa, Artificial
  IGFBP-2 heparin binding domain-containing peptide sequence
KHHIGIENPKK

SEQ ID NO: 357 - protein, 11 aa, Artificial
  IGFBP-2 heparin binding domain-containing peptide sequence
RHHIGINEPKK

SEQ ID NO: 358 - protein, 11 aa, Artificial
  IGFBP-2 heparin binding domain-containing peptide sequence
HHHIGINEPKK

SEQ ID NO: 359 - protein, 11 aa, Artificial
  IGFBP-2 heparin binding domain-containing peptide sequence
KKHIGINEPKK

SEQ ID NO: 360 - protein, 11 aa, Artificial
  IGFBP-2 heparin binding domain-containing peptide sequence
RKHIGINEPKK

SEQ ID NO: 361 - protein, 11 aa, Artificial
  IGFBP-2 heparin binding domain-containing peptide sequence
HKHIGINEPKK

SEQ ID NO: 362 - protein, 11 aa, Artificial
  IGFBP-2 heparin binding domain-containing peptide sequence
KRHIGINEPKK

SEQ ID NO: 363 - protein, 11 aa, Artificial
  IGFBP-2 heparin binding domain-containing peptide sequence
RRHIGINEPKK

SEQ ID NO: 364 - protein, 11 aa, Artificial
  IGFBP-2 heparin binding domain-containing peptide sequence
HRHIGINEPKK

SEQ ID NO: 365 - protein, 11 aa, Artificial
  IGFBP-2 heparin binding domain-containing peptide sequence
KHKIGINEPKK

SEQ ID NO: 366 - protein, 11 aa, Artificial
  IGFBP-2 heparin binding domain-containing peptide sequence
RHKIGINEPKK

SEQ ID NO: 367 - protein, 11 aa, Artificial
  IGFBP-2 heparin binding domain-containing peptide sequence
HHKIGINEPKK

SEQ ID NO: 368 - protein, 11 aa, Artificial
  IGFBP-2 heparin binding domain-containing peptide sequence
KKKIGINEPKK

SEQ ID NO: 369 - protein, 11 aa, Artificial
  IGFBP-2 heparin binding domain-containing peptide sequence
RKKIGINEPKK

SEQ ID NO: 370 - protein, 11 aa, Artificial
  IGFBP-2 heparin binding domain-containing peptide sequence
HKKIGINEPKK

SEQ ID NO: 371 - protein, 11 aa, Artificial
  IGFBP-2 heparin binding domain-containing peptide sequence
KRKIGINEPKK

SEQ ID NO: 372 - protein, 11 aa, Artificial
  IGFBP-2 heparin binding domain-containing peptide sequence
RRKIGINEPKK

SEQ ID NO: 373 - protein, 11 aa, Artificial
  IGFBP-2 heparin binding domain-containing peptide sequence
HRKIGINEPKK

SEQ ID NO: 374 - protein, 11 aa, Artificial
  IGFBP-2 heparin binding domain-containing peptide sequence
KHRIGINEPKK

SEQ ID NO: 375 - protein, 11 aa, Artificial
  IGFBP-2 heparin binding domain-containing peptide sequence
RHRIGINEPKK

SEQ ID NO: 376 - protein, 11 aa, Artificial
  IGFBP-2 heparin binding domain-containing peptide sequence
HHRIGINEPKK

SEQ ID NO: 377 - protein, 11 aa, Artificial
  IGFBP-2 heparin binding domain-containing peptide sequence
KKRIGINEPKK

SEQ ID NO: 378 - protein, 11 aa, Artificial
  IGFBP-2 heparin binding domain-containing peptide sequence
RKRIGINEPKK

SEQ ID NO: 379 - protein, 11 aa, Artificial
  IGFBP-2 heparin binding domain-containing peptide sequence
HKRIGINEPKK

SEQ ID NO: 380 - protein, 11 aa, Artificial
  IGFBP-2 heparin binding domain-containing peptide sequence
KRRIGINEPKK

SEQ ID NO: 381 - protein, 11 aa, Artificial
  IGFBP-2 heparin binding domain-containing peptide sequence
RRRIGINEPKK

SEQ ID NO: 382 - protein, 11 aa, Artificial
  IGFBP-2 heparin binding domain-containing peptide sequence
HRRIGINEPKK

SEQ ID NO: 383 - protein, 11 aa, Artificial
  IGFBP-2 heparin binding domain-containing peptide sequence
KHHVGINEPKK

SEQ ID NO: 384 - protein, 11 aa, Artificial
  IGFBP-2 heparin binding domain-containing peptide sequence
RHHVGINEPKK

SEQ ID NO: 385 - protein, 11 aa, Artificial
  IGFBP-2 heparin binding domain-containing peptide sequence
HHHVGINEPKK

SEQ ID NO: 386 - protein, 11 aa, Artificial
  IGFBP-2 heparin binding domain-containing peptide sequence
KKHVGINEPKK

SEQ ID NO: 387 - protein, 11 aa, Artificial
  IGFBP-2 heparin binding domain-containing peptide sequence
RKHVGINEPKK

SEQ ID NO: 388 - protein, 11 aa, Artificial
  IGFBP-2 heparin binding domain-containing peptide sequence
HKHVGINEPKK

SEQ ID NO: 389 - protein, 11 aa, Artificial
  IGFBP-2 heparin binding domain-containing peptide sequence
KRHVGINEPKK

SEQ ID NO: 390 - protein, 11 aa, Artificial
  IGFBP-2 heparin binding domain-containing peptide sequence
RRHVGINEPKK

SEQ ID NO: 391 - protein, 11 aa, Artificial
  IGFBP-2 heparin binding domain-containing peptide sequence
HRHVGINEPKK

SEQ ID NO: 392 - protein, 11 aa, Artificial
  IGFBP-2 heparin binding domain-containing peptide sequence
KHKVGINEPKK

SEQ ID NO: 393 - protein, 11 aa, Artificial
  IGFBP-2 heparin binding domain-containing peptide sequence
RHKVGINEPKK

SEQ ID NO: 394 - protein, 11 aa, Artificial
  IGFBP-2 heparin binding domain-containing peptide sequence
HHKVGINEPKK

SEQ ID NO: 395 - protein, 11 aa, Artificial
  IGFBP-2 heparin binding domain-containing peptide sequence
KKKVGINEPKK

SEQ ID NO: 396 - protein, 11 aa, Artificial
  IGFBP-2 heparin binding domain-containing peptide sequence
RKKVGINEPKK

SEQ ID NO: 397 - protein, 11 aa, Artificial
  IGFBP-2 heparin binding domain-containing peptide sequence
HKKVGINEPKK

SEQ ID NO: 398 - protein, 11 aa, Artificial
  IGFBP-2 heparin binding domain-containing peptide sequence
KRKVGINEPKK

SEQ ID NO: 399 - protein, 11 aa, Artificial
  IGFBP-2 heparin binding domain-containing peptide sequence
RRKVGINEPKK

SEQ ID NO: 400 - protein, 11 aa, Artificial
  IGFBP-2 heparin binding domain-containing peptide sequence
HRKVGINEPKK

SEQ ID NO: 401 - protein, 11 aa, Artificial
  IGFBP-2 heparin binding domain-containing peptide sequence
KHRVGINEPKK

SEQ ID NO: 402 - protein, 11 aa, Artificial
  IGFBP-2 heparin binding domain-containing peptide sequence
RHRVGINEPKK

SEQ ID NO: 403 - protein, 11 aa, Artificial
  IGFBP-2 heparin binding domain-containing peptide sequence
HHRVGINEPKK

SEQ ID NO: 404 - protein, 11 aa, Artificial
  IGFBP-2 heparin binding domain-containing peptide sequence
KKRVGINEPKK

SEQ ID NO: 405 - protein, 11 aa, Artificial
  IGFBP-2 heparin binding domain-containing peptide sequence
RKRVGINEPKK

SEQ ID NO: 406 - protein, 11 aa, Artificial
  IGFBP-2 heparin binding domain-containing peptide sequence
HKRVGINEPKK

SEQ ID NO: 407 - protein, 11 aa, Artificial
  IGFBP-2 heparin binding domain-containing peptide sequence
KRRVGINEPKK

SEQ ID NO: 408 - protein, 11 aa, Artificial
  IGFBP-2 heparin binding domain-containing peptide sequence
RRRVGINEPKK

SEQ ID NO: 409 - protein, 11 aa, Artificial
  IGFBP-2 heparin binding domain-containing peptide sequence
HRRVGINEPKK

SEQ ID NO: 410 - protein, 11 aa, Artificial
  IGFBP-2 heparin binding domain-containing peptide sequence
KHHLGVNEPKK

SEQ ID NO: 411 - protein, 11 aa, Artificial
  IGFBP-2 heparin binding domain-containing peptide sequence
RHHLGVNEPKK

SEQ ID NO: 412 - protein, 11 aa, Artificial
  IGFBP-2 heparin binding domain-containing peptide sequence
HHHLGVNEPKK

SEQ ID NO: 413 - protein, 11 aa, Artificial
  IGFBP-2 heparin binding domain-containing peptide sequence
KKHLGVNEPKK

SEQ ID NO: 414 - protein, 11 aa, Artificial
  IGFBP-2 heparin binding domain-containing peptide sequence
RKHLGVNEPKK

SEQ ID NO: 415 - protein, 11 aa, Artificial
  IGFBP-2 heparin binding domain-containing peptide sequence
HKHLGVNEPKK

SEQ ID NO: 416 - protein, 11 aa, Artificial
  IGFBP-2 heparin binding domain-containing peptide sequence
KRHLGVNEPKK

SEQ ID NO: 417 - protein, 11 aa, Artificial
  IGFBP-2 heparin binding domain-containing peptide sequence
RRHLGVNEPKK

SEQ ID NO: 418 - protein, 11 aa, Artificial
  IGFBP-2 heparin binding domain-containing peptide sequence
HRHLGVNEPKK

SEQ ID NO: 419 - protein, 11 aa, Artificial
  IGFBP-2 heparin binding domain-containing peptide sequence
KHKLGVNEPKK

SEQ ID NO: 420 - protein, 11 aa, Artificial
  IGFBP-2 heparin binding domain-containing peptide sequence
RHKLGVNEPKK

SEQ ID NO: 421 - protein, 11 aa, Artificial
  IGFBP-2 heparin binding domain-containing peptide sequence
HHKLGVNEPKK

SEQ ID NO: 422 - protein, 11 aa, Artificial
  IGFBP-2 heparin binding domain-containing peptide sequence
KKKLGVNEPKK

SEQ ID NO: 423 - protein, 11 aa, Artificial
  IGFBP-2 heparin binding domain-containing peptide sequence
RKKLGVNEPKK

SEQ ID NO: 424 - protein, 11 aa, Artificial
  IGFBP-2 heparin binding domain-containing peptide sequence
HKKLGVNEPKK

SEQ ID NO: 425 - protein, 11 aa, Artificial
  IGFBP-2 heparin binding domain-containing peptide sequence
KRKLGVNEPKK

SEQ ID NO: 426 - protein, 11 aa, Artificial
  IGFBP-2 heparin binding domain-containing peptide sequence
RRKLGVNEPKK

SEQ ID NO: 427 - protein, 11 aa, Artificial
  IGFBP-2 heparin binding domain-containing peptide sequence
HRKLGVNEPKK

SEQ ID NO: 428 - protein, 11 aa, Artificial
  IGFBP-2 heparin binding domain-containing peptide sequence
KHRLGVNEPKK

SEQ ID NO: 429 - protein, 11 aa, Artificial
  IGFBP-2 heparin binding domain-containing peptide sequence
RHRLGVNEPKK

SEQ ID NO: 430 - protein, 11 aa, Artificial
  IGFBP-2 heparin binding domain-containing peptide sequence
HHRLGVNEPKK

SEQ ID NO: 431 - protein, 11 aa, Artificial
  IGFBP-2 heparin binding domain-containing peptide sequence
KKRLGVNEPKK

SEQ ID NO: 432 - protein, 11 aa, Artificial
  IGFBP-2 heparin binding domain-containing peptide sequence
RKRLGVNEPKK

SEQ ID NO: 433 - protein, 11 aa, Artificial
  IGFBP-2 heparin binding domain-containing peptide sequence
HKRLGVNEPKK

SEQ ID NO: 434 - protein, 11 aa, Artificial
  IGFBP-2 heparin binding domain-containing peptide sequence
KRRLGVNEPKK

SEQ ID NO: 435 - protein, 11 aa, Artificial
  IGFBP-2 heparin binding domain-containing peptide sequence
RRRLGVNEPKK

SEQ ID NO: 436 - protein, 11 aa, Artificial
  IGFBP-2 heparin binding domain-containing peptide sequence
HRRLGVNEPKK

SEQ ID NO: 437 - protein, 11 aa, Artificial
  IGFBP-2 heparin binding domain-containing peptide sequence
KHHIGVNEPKK

SEQ ID NO: 438 - protein, 11 aa, Artificial
  IGFBP-2 heparin binding domain-containing peptide sequence
RHHIGVNEPKK

SEQ ID NO: 439 - protein, 11 aa, Artificial
  IGFBP-2 heparin binding domain-containing peptide sequence
HHHIGVNEPKK

SEQ ID NO: 440 - protein, 11 aa, Artificial
  IGFBP-2 heparin binding domain-containing peptide sequence
KKHIGVNEPKK

SEQ ID NO: 441 - protein, 11 aa, Artificial
  IGFBP-2 heparin binding domain-containing peptide sequence
RKHIGVNEPKK

SEQ ID NO: 442 - protein, 11 aa, Artificial
  IGFBP-2 heparin binding domain-containing peptide sequence
HKHIGVNEPKK

SEQ ID NO: 443 - protein, 11 aa, Artificial
  IGFBP-2 heparin binding domain-containing peptide sequence
KRHIGVNEPKK

SEQ ID NO: 444 - protein, 11 aa, Artificial
  IGFBP-2 heparin binding domain-containing peptide sequence
RRHIGVNEPKK

SEQ ID NO: 445 - protein, 11 aa, Artificial
  IGFBP-2 heparin binding domain-containing peptide sequence
HRHIGVNEPKK

SEQ ID NO: 446 - protein, 11 aa, Artificial
  IGFBP-2 heparin binding domain-containing peptide sequence
KHKIGVNEPKK

SEQ ID NO: 447 - protein, 11 aa, Artificial
  IGFBP-2 heparin binding domain-containing peptide sequence
RHKIGVNEPKK

SEQ ID NO: 448 - protein, 11 aa, Artificial
  IGFBP-2 heparin binding domain-containing peptide sequence
HHKIGVNEPKK

SEQ ID NO: 449 - protein, 11 aa, Artificial
  IGFBP-2 heparin binding domain-containing peptide sequence
KKKIGVNEPKK

SEQ ID NO: 450 - protein, 11 aa, Artificial
  IGFBP-2 heparin binding domain-containing peptide sequence
RKKIGVNEPKK

SEQ ID NO: 451 - protein, 11 aa, Artificial
  IGFBP-2 heparin binding domain-containing peptide sequence
HKKIGVNEPKK

SEQ ID NO: 452 - protein, 11 aa, Artificial
  IGFBP-2 heparin binding domain-containing peptide sequence
KRKIGVNEPKK

SEQ ID NO: 453 - protein, 11 aa, Artificial
  IGFBP-2 heparin binding domain-containing peptide sequence
RRKIGVNEPKK

SEQ ID NO: 454 - protein, 11 aa, Artificial
  IGFBP-2 heparin binding domain-containing peptide sequence
HRKIGVNEPKK

SEQ ID NO: 455 - protein, 11 aa, Artificial
  IGFBP-2 heparin binding domain-containing peptide sequence
KHRIGVNEPKK

SEQ ID NO: 456 - protein, 11 aa, Artificial
  IGFBP-2 heparin binding domain-containing peptide sequence
RHRIGVNEPKK

SEQ ID NO: 457 - protein, 11 aa, Artificial
  IGFBP-2 heparin binding domain-containing peptide sequence
HHRIGVNEPKK

SEQ ID NO: 458 - protein, 11 aa, Artificial
  IGFBP-2 heparin binding domain-containing peptide sequence
KKRIGVNEPKK

SEQ ID NO: 459 - protein, 11 aa, Artificial
  IGFBP-2 heparin binding domain-containing peptide sequence
RKRIGVNEPKK

SEQ ID NO: 460 - protein, 11 aa, Artificial
  IGFBP-2 heparin binding domain-containing peptide sequence
HKRIGVNEPKK

SEQ ID NO: 461 - protein, 11 aa, Artificial
  IGFBP-2 heparin binding domain-containing peptide sequence
KRRIGVNEPKK

SEQ ID NO: 462 - protein, 11 aa, Artificial
  IGFBP-2 heparin binding domain-containing peptide sequence
RRRIGVNEPKK

SEQ ID NO: 463 - protein, 11 aa, Artificial
  IGFBP-2 heparin binding domain-containing peptide sequence
HRRIGVNEPKK

SEQ ID NO: 464 - protein, 11 aa, Artificial
  IGFBP-2 heparin binding domain-containing peptide sequence
KHHVGVNEPKK

SEQ ID NO: 465 - protein, 11 aa, Artificial
  IGFBP-2 heparin binding domain-containing peptide sequence
RHHVGVNEPKK

SEQ ID NO: 466 - protein, 11 aa, Artificial
  IGFBP-2 heparin binding domain-containing peptide sequence
HHHVGVNEPKK

SEQ ID NO: 467 - protein, 11 aa, Artificial
  IGFBP-2 heparin binding domain-containing peptide sequence
KKHVGVNEPKK

SEQ ID NO: 468 - protein, 11 aa, Artificial
  IGFBP-2 heparin binding domain-containing peptide sequence
RKHVGVNEPKK

SEQ ID NO: 469 - protein, 11 aa, Artificial
  IGFBP-2 heparin binding domain-containing peptide sequence
HKHVGVNEPKK

SEQ ID NO: 470 - protein, 11 aa, Artificial
  IGFBP-2 heparin binding domain-containing peptide sequence
KRHVGVNEPKK

SEQ ID NO: 471 - protein, 11 aa, Artificial
  IGFBP-2 heparin binding domain-containing peptide sequence
RRHVGVNEPKK

SEQ ID NO: 472 - protein, 11 aa, Artificial
  IGFBP-2 heparin binding domain-containing peptide sequence
HRHVGVNEPKK

SEQ ID NO: 473 - protein, 11 aa, Artificial
  IGFBP-2 heparin binding domain-containing peptide sequence
KHKVGVNEPKK

SEQ ID NO: 474 - protein, 11 aa, Artificial
  IGFBP-2 heparin binding domain-containing peptide sequence
RHKVGVNEPKK

SEQ ID NO: 475 - protein, 11 aa, Artificial
  IGFBP-2 heparin binding domain-containing peptide sequence
HHKVGVNEPKK

SEQ ID NO: 476 - protein, 11 aa, Artificial
  IGFBP-2 heparin binding domain-containing peptide sequence
KKKVGVNEPKK

SEQ ID NO: 477 - protein, 11 aa, Artificial
  IGFBP-2 heparin binding domain-containing peptide sequence
RKKVGVNEPKK

SEQ ID NO: 478 - protein, 11 aa, Artificial
  IGFBP-2 heparin binding domain-containing peptide sequence
HKKVGVNEPKK

SEQ ID NO: 479 - protein, 11 aa, Artificial
  IGFBP-2 heparin binding domain-containing peptide sequence
KRKVGVNEPKK

SEQ ID NO: 480 - protein, 11 aa, Artificial
  IGFBP-2 heparin binding domain-containing peptide sequence
RRKVGVNEPKK

SEQ ID NO: 481 - protein, 11 aa, Artificial
  IGFBP-2 heparin binding domain-containing peptide sequence
HRKVGVNEPKK

SEQ ID NO: 482 - protein, 11 aa, Artificial
  IGFBP-2 heparin binding domain-containing peptide sequence
KHRVGVNEPKK

SEQ ID NO: 483 - protein, 11 aa, Artificial
  IGFBP-2 heparin binding domain-containing peptide sequence
RHRVGVNEPKK

SEQ ID NO: 484 - protein, 11 aa, Artificial
  IGFBP-2 heparin binding domain-containing peptide sequence
HHRVGVNEPKK

SEQ ID NO: 485 - protein, 11 aa, Artificial
  IGFBP-2 heparin binding domain-containing peptide sequence
KKRVGVNEPKK

SEQ ID NO: 486 - protein, 11 aa, Artificial
  IGFBP-2 heparin binding domain-containing peptide sequence
RKRVGVNEPKK

SEQ ID NO: 487 - protein, 11 aa, Artificial
  IGFBP-2 heparin binding domain-containing peptide sequence
HKRVGVNEPKK

SEQ ID NO: 488 - protein, 11 aa, Artificial
  IGFBP-2 heparin binding domain-containing peptide sequence
KRRVGVNEPKK

SEQ ID NO: 489 - protein, 11 aa, Artificial
  IGFBP-2 heparin binding domain-containing peptide sequence
RRRVGVNEPKK

SEQ ID NO: 490 - protein, 11 aa, Artificial
  IGFBP-2 heparin binding domain-containing peptide sequence
HRRVGVNEPKK

SEQ ID NO: 491 - protein, 11 aa, Artificial
  IGFBP-2 heparin binding domain-containing peptide sequence
KHHLGLENPKK

SEQ ID NO: 492 - protein, 11 aa, Artificial
  IGFBP-2 heparin binding domain-containing peptide sequence
RHHLGLENPKK

SEQ ID NO: 493 - protein, 11 aa, Artificial
  IGFBP-2 heparin binding domain-containing peptide sequence
HHHLGLENPKK

SEQ ID NO: 494 - protein, 11 aa, Artificial
  IGFBP-2 heparin binding domain-containing peptide sequence
KKHLGLENPKK

SEQ ID NO: 495 - protein, 11 aa, Artificial
  IGFBP-2 heparin binding domain-containing peptide sequence
RKHLGLENPKK

SEQ ID NO: 496 - protein, 11 aa, Artificial
  IGFBP-2 heparin binding domain-containing peptide sequence
HKHLGLENPKK

SEQ ID NO: 497 - protein, 11 aa, Artificial
  IGFBP-2 heparin binding domain-containing peptide sequence
KRHLGLENPKK

SEQ ID NO: 498 - protein, 11 aa, Artificial
  IGFBP-2 heparin binding domain-containing peptide sequence
RRHLGLENPKK

SEQ ID NO: 499 - protein, 11 aa, Artificial
  IGFBP-2 heparin binding domain-containing peptide sequence
HRHLGLENPKK

SEQ ID NO: 500 - protein, 11 aa, Artificial
  IGFBP-2 heparin binding domain-containing peptide sequence
KHKLGLENPKK

SEQ ID NO: 501 - protein, 11 aa, Artificial
  IGFBP-2 heparin binding domain-containing peptide sequence
RHKLGLENPKK

SEQ ID NO: 502 - protein, 11 aa, Artificial
  IGFBP-2 heparin binding domain-containing peptide sequence
HHKLGLENPKK

SEQ ID NO: 503 - protein, 11 aa, Artificial
  IGFBP-2 heparin binding domain-containing peptide sequence
KKKLGLENPKK

SEQ ID NO: 504 - protein, 11 aa, Artificial
  IGFBP-2 heparin binding domain-containing peptide sequence
RKKLGLENPKK

SEQ ID NO: 505 - protein, 11 aa, Artificial
  IGFBP-2 heparin binding domain-containing peptide sequence
HKKLGLENPKK

SEQ ID NO: 506 - protein, 11 aa, Artificial
  IGFBP-2 heparin binding domain-containing peptide sequence
KRKLGLENPKK

SEQ ID NO: 507 - protein, 11 aa, Artificial
  IGFBP-2 heparin binding domain-containing peptide sequence
RRKLGLENPKK

SEQ ID NO: 508 - protein, 11 aa, Artificial
  IGFBP-2 heparin binding domain-containing peptide sequence
HRKLGLENPKK

SEQ ID NO: 509 - protein, 11 aa, Artificial
  IGFBP-2 heparin binding domain-containing peptide sequence
KHRLGLENPKK

SEQ ID NO: 510 - protein, 11 aa, Artificial
  IGFBP-2 heparin binding domain-containing peptide sequence
RHRLGLENPKK

SEQ ID NO: 511 - protein, 11 aa, Artificial
  IGFBP-2 heparin binding domain-containing peptide sequence
HHRLGLENPKK

SEQ ID NO: 512 - protein, 11 aa, Artificial
  IGFBP-2 heparin binding domain-containing peptide sequence
KKRLGLENPKK

SEQ ID NO: 513 - protein, 11 aa, Artificial
  IGFBP-2 heparin binding domain-containing peptide sequence
RKRLGLENPKK

SEQ ID NO: 514 - protein, 11 aa, Artificial
  IGFBP-2 heparin binding domain-containing peptide sequence
HKRLGLENPKK

SEQ ID NO: 515 - protein, 11 aa, Artificial
  IGFBP-2 heparin binding domain-containing peptide sequence
KRRLGLENPKK

SEQ ID NO: 516 - protein, 11 aa, Artificial
  IGFBP-2 heparin binding domain-containing peptide sequence
RRRLGLENPKK

SEQ ID NO: 517 - protein, 11 aa, Artificial
  IGFBP-2 heparin binding domain-containing peptide sequence
HRRLGLENPKK

SEQ ID NO: 518 - protein, 11 aa, Artificial
  IGFBP-2 heparin binding domain-containing peptide sequence
KHHIGLENPKK

SEQ ID NO: 519 - protein, 11 aa, Artificial
  IGFBP-2 heparin binding domain-containing peptide sequence
RHHIGLENPKK

SEQ ID NO: 520 - protein, 11 aa, Artificial
  IGFBP-2 heparin binding domain-containing peptide sequence
HHHIGLENPKK

SEQ ID NO: 521 - protein, 11 aa, Artificial
  IGFBP-2 heparin binding domain-containing peptide sequence
KKHIGLENPKK

SEQ ID NO: 522 - protein, 11 aa, Artificial
  IGFBP-2 heparin binding domain-containing peptide sequence
RKHIGLENPKK

SEQ ID NO: 523 - protein, 11 aa, Artificial
  IGFBP-2 heparin binding domain-containing peptide sequence
HKHIGLENPKK

SEQ ID NO: 524 - protein, 11 aa, Artificial
  IGFBP-2 heparin binding domain-containing peptide sequence
KRHIGLENPKK

SEQ ID NO: 525 - protein, 11 aa, Artificial
  IGFBP-2 heparin binding domain-containing peptide sequence
RRHIGLENPKK

SEQ ID NO: 526 - protein, 11 aa, Artificial
  IGFBP-2 heparin binding domain-containing peptide sequence
HRHIGLENPKK

SEQ ID NO: 527 - protein, 11 aa, Artificial
  IGFBP-2 heparin binding domain-containing peptide sequence
KHKIGLENPKK

SEQ ID NO: 528 - protein, 11 aa, Artificial
  IGFBP-2 heparin binding domain-containing peptide sequence
RHKIGLENPKK

SEQ ID NO: 529 - protein, 11 aa, Artificial
  IGFBP-2 heparin binding domain-containing peptide sequence
HHKIGLENPKK

SEQ ID NO: 530 - protein, 11 aa, Artificial
  IGFBP-2 heparin binding domain-containing peptide sequence
KKKIGLENPKK

SEQ ID NO: 531 - protein, 11 aa, Artificial
  IGFBP-2 heparin binding domain-containing peptide sequence
RKKIGLENPKK

SEQ ID NO: 532 - protein, 11 aa, Artificial
  IGFBP-2 heparin binding domain-containing peptide sequence
HKKIGLENPKK

SEQ ID NO: 533 - protein, 11 aa, Artificial
  IGFBP-2 heparin binding domain-containing peptide sequence
KRKIGLENPKK

SEQ ID NO: 534 - protein, 11 aa, Artificial
  IGFBP-2 heparin binding domain-containing peptide sequence
RRKIGLENPKK

SEQ ID NO: 535 - protein, 11 aa, Artificial
  IGFBP-2 heparin binding domain-containing peptide sequence
HRKIGLENPKK

SEQ ID NO: 536 - protein, 11 aa, Artificial
  IGFBP-2 heparin binding domain-containing peptide sequence
KHRIGLENPKK

SEQ ID NO: 537 - protein, 11 aa, Artificial
  IGFBP-2 heparin binding domain-containing peptide sequence
RHRIGLENPKK

SEQ ID NO: 538 - protein, 11 aa, Artificial
  IGFBP-2 heparin binding domain-containing peptide sequence
HHRIGLENPKK

SEQ ID NO: 539 - protein, 11 aa, Artificial
  IGFBP-2 heparin binding domain-containing peptide sequence
KKRIGLENPKK

SEQ ID NO: 540 - protein, 11 aa, Artificial
  IGFBP-2 heparin binding domain-containing peptide sequence
RKRIGLENPKK

SEQ ID NO: 541 - protein, 11 aa, Artificial
  IGFBP-2 heparin binding domain-containing peptide sequence
HKRIGLENPKK

SEQ ID NO: 542 - protein, 11 aa, Artificial
  IGFBP-2 heparin binding domain-containing peptide sequence
KRRIGLENPKK

SEQ ID NO: 543 - protein, 11 aa, Artificial
  IGFBP-2 heparin binding domain-containing peptide sequence
RRRIGLENPKK

SEQ ID NO: 544 - protein, 11 aa, Artificial
  IGFBP-2 heparin binding domain-containing peptide sequence
HRRIGLENPKK

SEQ ID NO: 545 - protein, 11 aa, Artificial
  IGFBP-2 heparin binding domain-containing peptide sequence
KHHVGLENPKK

SEQ ID NO: 546 - protein, 11 aa, Artificial
  IGFBP-2 heparin binding domain-containing peptide sequence
RHHVGLENPKK

SEQ ID NO: 547 - protein, 11 aa, Artificial
  IGFBP-2 heparin binding domain-containing peptide sequence
HHHVGLENPKK

SEQ ID NO: 548 - protein, 11 aa, Artificial
  IGFBP-2 heparin binding domain-containing peptide sequence
KKHVGLENPKK

SEQ ID NO: 549 - protein, 11 aa, Artificial
  IGFBP-2 heparin binding domain-containing peptide sequence
RKHVGLENPKK

SEQ ID NO: 550 - protein, 11 aa, Artificial
  IGFBP-2 heparin binding domain-containing peptide sequence
HKHVGLENPKK

SEQ ID NO: 551 - protein, 11 aa, Artificial
  IGFBP-2 heparin binding domain-containing peptide sequence
KRHVGLENPKK

SEQ ID NO: 552 - protein, 11 aa, Artificial
  IGFBP-2 heparin binding domain-containing peptide sequence
RRHVGLENPKK

SEQ ID NO: 553 - protein, 11 aa, Artificial
  IGFBP-2 heparin binding domain-containing peptide sequence
HRHVGLENPKK

SEQ ID NO: 554 - protein, 11 aa, Artificial
  IGFBP-2 heparin binding domain-containing peptide sequence
KHKVGLENPKK

SEQ ID NO: 555 - protein, 11 aa, Artificial
  IGFBP-2 heparin binding domain-containing peptide sequence
RHKVGLENPKK

SEQ ID NO: 556 - protein, 11 aa, Artificial
  IGFBP-2 heparin binding domain-containing peptide sequence
HHKVGLENPKK

SEQ ID NO: 557 - protein, 11 aa, Artificial
  IGFBP-2 heparin binding domain-containing peptide sequence
KKKVGLENPKK

SEQ ID NO: 558 - protein, 11 aa, Artificial
  IGFBP-2 heparin binding domain-containing peptide sequence
RKKVGLENPKK

SEQ ID NO: 559 - protein, 11 aa, Artificial
  IGFBP-2 heparin binding domain-containing peptide sequence
HKKVGLENPKK

SEQ ID NO: 560 - protein, 11 aa, Artificial
  IGFBP-2 heparin binding domain-containing peptide sequence
KRKVGLENPKK

SEQ ID NO: 561 - protein, 11 aa, Artificial
  IGFBP-2 heparin binding domain-containing peptide sequence
RRKVGLENPKK

SEQ ID NO: 562 - protein, 11 aa, Artificial
  IGFBP-2 heparin binding domain-containing peptide sequence
HRKVGLENPKK

SEQ ID NO: 563 - protein, 11 aa, Artificial
  IGFBP-2 heparin binding domain-containing peptide sequence
KHRVGLENPKK

SEQ ID NO: 564 - protein, 11 aa, Artificial
  IGFBP-2 heparin binding domain-containing peptide sequence
RHRVGLENPKK

SEQ ID NO: 565 - protein, 11 aa, Artificial
  IGFBP-2 heparin binding domain-containing peptide sequence
HHRVGLENPKK

SEQ ID NO: 566 - protein, 11 aa, Artificial
  IGFBP-2 heparin binding domain-containing peptide sequence
KKRVGLENPKK

SEQ ID NO: 567 - protein, 11 aa, Artificial
  IGFBP-2 heparin binding domain-containing peptide sequence
RKRVGLENPKK

SEQ ID NO: 568 - protein, 11 aa, Artificial
  IGFBP-2 heparin binding domain-containing peptide sequence
HKRVGLENPKK

SEQ ID NO: 569 - protein, 11 aa, Artificial
  IGFBP-2 heparin binding domain-containing peptide sequence
KRRVGLENPKK

SEQ ID NO: 570 - protein, 11 aa, Artificial
  IGFBP-2 heparin binding domain-containing peptide sequence
RRRVGLENPKK

SEQ ID NO: 571 - protein, 11 aa, Artificial
  IGFBP-2 heparin binding domain-containing peptide sequence
HRRVGLENPKK

SEQ ID NO: 572 - protein, 11 aa, Artificial
  IGFBP-2 heparin binding domain-containing peptide sequence
KHHLGIENPKK

SEQ ID NO: 573 - protein, 11 aa, Artificial
  IGFBP-2 heparin binding domain-containing peptide sequence
RHHLGIENPKK

SEQ ID NO: 574 - protein, 11 aa, Artificial
  IGFBP-2 heparin binding domain-containing peptide sequence
HHHLGIENPKK

SEQ ID NO: 575 - protein, 11 aa, Artificial
  IGFBP-2 heparin binding domain-containing peptide sequence
KKHLGIENPKK

SEQ ID NO: 576 - protein, 11 aa, Artificial
  IGFBP-2 heparin binding domain-containing peptide sequence
RKHLGIENPKK

SEQ ID NO: 577 - protein, 11 aa, Artificial
  IGFBP-2 heparin binding domain-containing peptide sequence
HKHLGIENPKK

SEQ ID NO: 578 - protein, 11 aa, Artificial
  IGFBP-2 heparin binding domain-containing peptide sequence
KRHLGIENPKK

SEQ ID NO: 579 - protein, 11 aa, Artificial
  IGFBP-2 heparin binding domain-containing peptide sequence
RRHLGIENPKK

SEQ ID NO: 580 - protein, 11 aa, Artificial
  IGFBP-2 heparin binding domain-containing peptide sequence
HRHLGIENPKK

SEQ ID NO: 581 - protein, 11 aa, Artificial
  IGFBP-2 heparin binding domain-containing peptide sequence
KHKLGIENPKK

SEQ ID NO: 582 - protein, 11 aa, Artificial
  IGFBP-2 heparin binding domain-containing peptide sequence
RHKLGIENPKK

SEQ ID NO: 583 - protein, 11 aa, Artificial
  IGFBP-2 heparin binding domain-containing peptide sequence
HHKLGIENPKK

SEQ ID NO: 584 - protein, 11 aa, Artificial
  IGFBP-2 heparin binding domain-containing peptide sequence
KKKLGIENPKK

SEQ ID NO: 585 - protein, 11 aa, Artificial
  IGFBP-2 heparin binding domain-containing peptide sequence
RKKLGIENPKK

SEQ ID NO: 586 - protein, 11 aa, Artificial
  IGFBP-2 heparin binding domain-containing peptide sequence
HKKLGIENPKK

SEQ ID NO: 587 - protein, 11 aa, Artificial
  IGFBP-2 heparin binding domain-containing peptide sequence
KRKLGIENPKK

SEQ ID NO: 588 - protein, 11 aa, Artificial
  IGFBP-2 heparin binding domain-containing peptide sequence
RRKLGIENPKK

SEQ ID NO: 589 - protein, 11 aa, Artificial
  IGFBP-2 heparin binding domain-containing peptide sequence
HRKLGIENPKK

SEQ ID NO: 590 - protein, 11 aa, Artificial
  IGFBP-2 heparin binding domain-containing peptide sequence
KHRLGIENPKK

SEQ ID NO: 591 - protein, 11 aa, Artificial
  IGFBP-2 heparin binding domain-containing peptide sequence
RHRLGIENPKK

SEQ ID NO: 592 - protein, 11 aa, Artificial
  IGFBP-2 heparin binding domain-containing peptide sequence
HHRLGIENPKK

SEQ ID NO: 593 - protein, 11 aa, Artificial
  IGFBP-2 heparin binding domain-containing peptide sequence
KKRLGIENPKK

SEQ ID NO: 594 - protein, 11 aa, Artificial
  IGFBP-2 heparin binding domain-containing peptide sequence
RKRLGIENPKK

SEQ ID NO: 595 - protein, 11 aa, Artificial
  IGFBP-2 heparin binding domain-containing peptide sequence
HKRLGIENPKK

SEQ ID NO: 596 - protein, 11 aa, Artificial
  IGFBP-2 heparin binding domain-containing peptide sequence
KRRLGIENPKK

SEQ ID NO: 597 - protein, 11 aa, Artificial
  IGFBP-2 heparin binding domain-containing peptide sequence
RRRLGIENPKK

SEQ ID NO: 598 - protein, 11 aa, Artificial
  IGFBP-2 heparin binding domain-containing peptide sequence
HRRLGIENPKK

SEQ ID NO: 599 - protein, 11 aa, Artificial
  IGFBP-2 heparin binding domain-containing peptide sequence
KHHIGIENPKK

SEQ ID NO: 600 - protein, 11 aa, Artificial
  IGFBP-2 heparin binding domain-containing peptide sequence
RHHIGIENPKK

SEQ ID NO: 601 - protein, 11 aa, Artificial
  IGFBP-2 heparin binding domain-containing peptide sequence
HHHIGIENPKK

SEQ ID NO: 602 - protein, 11 aa, Artificial
  IGFBP-2 heparin binding domain-containing peptide sequence
KKHIGIENPKK

SEQ ID NO: 603 - protein, 11 aa, Artificial
  IGFBP-2 heparin binding domain-containing peptide sequence
RKHIGIENPKK

SEQ ID NO: 604 - protein, 11 aa, Artificial
  IGFBP-2 heparin binding domain-containing peptide sequence
HKHIGIENPKK

SEQ ID NO: 605 - protein, 11 aa, Artificial
  IGFBP-2 heparin binding domain-containing peptide sequence
KRHIGIENPKK

SEQ ID NO: 606 - protein, 11 aa, Artificial
  IGFBP-2 heparin binding domain-containing peptide sequence
RRHIGIENPKK

SEQ ID NO: 607 - protein, 11 aa, Artificial
  IGFBP-2 heparin binding domain-containing peptide sequence
HRHIGIENPKK

SEQ ID NO: 608 - protein, 11 aa, Artificial
  IGFBP-2 heparin binding domain-containing peptide sequence
KHKIGIENPKK

SEQ ID NO: 609 - protein, 11 aa, Artificial
  IGFBP-2 heparin binding domain-containing peptide sequence
RHKIGIENPKK

SEQ ID NO: 610 - protein, 11 aa, Artificial
  IGFBP-2 heparin binding domain-containing peptide sequence
HHKIGIENPKK

SEQ ID NO: 611 - protein, 11 aa, Artificial
  IGFBP-2 heparin binding domain-containing peptide sequence
KKKIGIENPKK

SEQ ID NO: 612 - protein, 11 aa, Artificial
  IGFBP-2 heparin binding domain-containing peptide sequence
RKKIGIENPKK

SEQ ID NO: 613 - protein, 11 aa, Artificial
  IGFBP-2 heparin binding domain-containing peptide sequence
HKKIGIENPKK

SEQ ID NO: 614 - protein, 11 aa, Artificial
  IGFBP-2 heparin binding domain-containing peptide sequence
KRKIGIENPKK

SEQ ID NO: 615 - protein, 11 aa, Artificial
  IGFBP-2 heparin binding domain-containing peptide sequence
RRKIGIENPKK

SEQ ID NO: 616 - protein, 11 aa, Artificial
  IGFBP-2 heparin binding domain-containing peptide sequence
HRKIGIENPKK

SEQ ID NO: 617 - protein, 11 aa, Artificial
  IGFBP-2 heparin binding domain-containing peptide sequence
KHRIGIENPKK

SEQ ID NO: 618 - protein, 11 aa, Artificial
  IGFBP-2 heparin binding domain-containing peptide sequence
RHRIGIENPKK

SEQ ID NO: 619 - protein, 11 aa, Artificial
  IGFBP-2 heparin binding domain-containing peptide sequence
HHRIGIENPKK

SEQ ID NO: 620 - protein, 11 aa, Artificial
  IGFBP-2 heparin binding domain-containing peptide sequence
KKRIGIENPKK

SEQ ID NO: 621 - protein, 11 aa, Artificial
  IGFBP-2 heparin binding domain-containing peptide sequence
RKRIGIENPKK

SEQ ID NO: 622 - protein, 11 aa, Artificial
  IGFBP-2 heparin binding domain-containing peptide sequence
HKRIGIENPKK

SEQ ID NO: 623 - protein, 11 aa, Artificial
  IGFBP-2 heparin binding domain-containing peptide sequence
KRRIGIENPKK

SEQ ID NO: 624 - protein, 11 aa, Artificial
  IGFBP-2 heparin binding domain-containing peptide sequence
RRRIGIENPKK

SEQ ID NO: 625 - protein, 11 aa, Artificial
  IGFBP-2 heparin binding domain-containing peptide sequence
HRRIGIENPKK

SEQ ID NO: 626 - protein, 11 aa, Artificial
  IGFBP-2 heparin binding domain-containing peptide sequence
KHHVGIENPKK

SEQ ID NO: 627 - protein, 11 aa, Artificial
  IGFBP-2 heparin binding domain-containing peptide sequence
RHHVGIENPKK

SEQ ID NO: 628 - protein, 11 aa, Artificial
  IGFBP-2 heparin binding domain-containing peptide sequence
HHHVGIENPKK

SEQ ID NO: 629 - protein, 11 aa, Artificial
  IGFBP-2 heparin binding domain-containing peptide sequence
KKHVGIENPKK

SEQ ID NO: 630 - protein, 11 aa, Artificial
  IGFBP-2 heparin binding domain-containing peptide sequence
RKHVGIENPKK

SEQ ID NO: 631 - protein, 11 aa, Artificial
  IGFBP-2 heparin binding domain-containing peptide sequence
HKHVGIENPKK

SEQ ID NO: 632 - protein, 11 aa, Artificial
  IGFBP-2 heparin binding domain-containing peptide sequence
KRHVGIENPKK

SEQ ID NO: 633 - protein, 11 aa, Artificial
  IGFBP-2 heparin binding domain-containing peptide sequence
RRHVGIENPKK

SEQ ID NO: 634 - protein, 11 aa, Artificial
  IGFBP-2 heparin binding domain-containing peptide sequence
HRHVGIENPKK

SEQ ID NO: 635 - protein, 11 aa, Artificial
  IGFBP-2 heparin binding domain-containing peptide sequence
KHKVGIENPKK

SEQ ID NO: 636 - protein, 11 aa, Artificial
  IGFBP-2 heparin binding domain-containing peptide sequence
RHKVGIENPKK

SEQ ID NO: 637 - protein, 11 aa, Artificial
  IGFBP-2 heparin binding domain-containing peptide sequence
HHKVGIENPKK

SEQ ID NO: 638 - protein, 11 aa, Artificial
  IGFBP-2 heparin binding domain-containing peptide sequence
KKKVGIENPKK

SEQ ID NO: 639 - protein, 11 aa, Artificial
  IGFBP-2 heparin binding domain-containing peptide sequence
RKKVGIENPKK

SEQ ID NO: 640 - protein, 11 aa, Artificial
  IGFBP-2 heparin binding domain-containing peptide sequence
HKKVGIENPKK

SEQ ID NO: 641 - protein, 11 aa, Artificial
  IGFBP-2 heparin binding domain-containing peptide sequence
KRKVGIENPKK

SEQ ID NO: 642 - protein, 11 aa, Artificial
  IGFBP-2 heparin binding domain-containing peptide sequence
RRKVGIENPKK

SEQ ID NO: 643 - protein, 11 aa, Artificial
  IGFBP-2 heparin binding domain-containing peptide sequence
HRKVGIENPKK

SEQ ID NO: 644 - protein, 11 aa, Artificial
  IGFBP-2 heparin binding domain-containing peptide sequence
KHRVGIENPKK

SEQ ID NO: 645 - protein, 11 aa, Artificial
  IGFBP-2 heparin binding domain-containing peptide sequence
RHRVGIENPKK

SEQ ID NO: 646 - protein, 11 aa, Artificial
  IGFBP-2 heparin binding domain-containing peptide sequence
HHRVGIENPKK

SEQ ID NO: 647 - protein, 11 aa, Artificial
  IGFBP-2 heparin binding domain-containing peptide sequence
KKRVGIENPKK

SEQ ID NO: 648 - protein, 11 aa, Artificial
  IGFBP-2 heparin binding domain-containing peptide sequence
RKRVGIENPKK

SEQ ID NO: 649 - protein, 11 aa, Artificial
  IGFBP-2 heparin binding domain-containing peptide sequence
HKRVGIENPKK

SEQ ID NO: 650 - protein, 11 aa, Artificial
  IGFBP-2 heparin binding domain-containing peptide sequence
KRRVGIENPKK

SEQ ID NO: 651 - protein, 11 aa, Artificial
  IGFBP-2 heparin binding domain-containing peptide sequence
RRRVGIENPKK

SEQ ID NO: 652 - protein, 11 aa, Artificial
  IGFBP-2 heparin binding domain-containing peptide sequence
HRRVGIENPKK

SEQ ID NO: 653 - protein, 11 aa, Artificial
  IGFBP-2 heparin binding domain-containing peptide sequence
KHHLGVENPKK

SEQ ID NO: 654 - protein, 11 aa, Artificial
  IGFBP-2 heparin binding domain-containing peptide sequence
RHHLGVENPKK

SEQ ID NO: 655 - protein, 11 aa, Artificial
  IGFBP-2 heparin binding domain-containing peptide sequence
HHHLGVENPKK

SEQ ID NO: 656 - protein, 11 aa, Artificial
  IGFBP-2 heparin binding domain-containing peptide sequence
KKHLGVENPKK

SEQ ID NO: 657 - protein, 11 aa, Artificial
  IGFBP-2 heparin binding domain-containing peptide sequence
RKHLGVENPKK

SEQ ID NO: 658 - protein, 11 aa, Artificial
  IGFBP-2 heparin binding domain-containing peptide sequence
HKHLGVENPKK

SEQ ID NO: 659 - protein, 11 aa, Artificial
  IGFBP-2 heparin binding domain-containing peptide sequence
KRHLGVENPKK

SEQ ID NO: 660 - protein, 11 aa, Artificial
  IGFBP-2 heparin binding domain-containing peptide sequence
RRHLGVENPKK

SEQ ID NO: 661 - protein, 11 aa, Artificial
  IGFBP-2 heparin binding domain-containing peptide sequence
HRHLGVENPKK

SEQ ID NO: 662 - protein, 11 aa, Artificial
  IGFBP-2 heparin binding domain-containing peptide sequence
KHKLGVENPKK

SEQ ID NO: 663 - protein, 11 aa, Artificial
  IGFBP-2 heparin binding domain-containing peptide sequence
RHKLGVENPKK

SEQ ID NO: 664 - protein, 11 aa, Artificial
  IGFBP-2 heparin binding domain-containing peptide sequence
HHKLGVENPKK

SEQ ID NO: 665 - protein, 11 aa, Artificial
  IGFBP-2 heparin binding domain-containing peptide sequence
KKKLGVENPKK

SEQ ID NO: 666 - protein, 11 aa, Artificial
  IGFBP-2 heparin binding domain-containing peptide sequence
RKKLGVENPKK

SEQ ID NO: 667 - protein, 11 aa, Artificial
  IGFBP-2 heparin binding domain-containing peptide sequence
HKKLGVENPKK

SEQ ID NO: 668 - protein, 11 aa, Artificial
  IGFBP-2 heparin binding domain-containing peptide sequence
KRKLGVENPKK

SEQ ID NO: 669 - protein, 11 aa, Artificial
  IGFBP-2 heparin binding domain-containing peptide sequence
RRKLGVENPKK

SEQ ID NO: 670 - protein, 11 aa, Artificial
  IGFBP-2 heparin binding domain-containing peptide sequence
HRKLGVENPKK

SEQ ID NO: 671 - protein, 11 aa, Artificial
  IGFBP-2 heparin binding domain-containing peptide sequence
KHRLGVENPKK

SEQ ID NO: 672 - protein, 11 aa, Artificial
  IGFBP-2 heparin binding domain-containing peptide sequence
RHRLGVENPKK

SEQ ID NO: 673 - protein, 11 aa, Artificial
  IGFBP-2 heparin binding domain-containing peptide sequence
HHRLGVENPKK

SEQ ID NO: 674 - protein, 11 aa, Artificial
  IGFBP-2 heparin binding domain-containing peptide sequence
KKRLGVENPKK

SEQ ID NO: 675 - protein, 11 aa, Artificial
  IGFBP-2 heparin binding domain-containing peptide sequence
RKRLGVENPKK

SEQ ID NO: 676 - protein, 11 aa, Artificial
  IGFBP-2 heparin binding domain-containing peptide sequence
HKRLGVENPKK

SEQ ID NO: 677 - protein, 11 aa, Artificial
  IGFBP-2 heparin binding domain-containing peptide sequence
KRRLGVENPKK

SEQ ID NO: 678 - protein, 11 aa, Artificial
  IGFBP-2 heparin binding domain-containing peptide sequence
RRRLGVENPKK

SEQ ID NO: 679 - protein, 11 aa, Artificial
  IGFBP-2 heparin binding domain-containing peptide sequence
HRRLGVENPKK

SEQ ID NO: 680 - protein, 11 aa, Artificial
  IGFBP-2 heparin binding domain-containing peptide sequence
KHHIGVENPKK

SEQ ID NO: 681 - protein, 11 aa, Artificial
  IGFBP-2 heparin binding domain-containing peptide sequence
RHHIGVEEPKK

SEQ ID NO: 682 - protein, 11 aa, Artificial
  IGFBP-2 heparin binding domain-containing peptide sequence
HHHIGVENPKK

SEQ ID NO: 683 - protein, 11 aa, Artificial
  IGFBP-2 heparin binding domain-containing peptide sequence
KKHIGVENPKK

SEQ ID NO: 684 - protein, 11 aa, Artificial
  IGFBP-2 heparin binding domain-containing peptide sequence
RKHIGVENPKK

SEQ ID NO: 685 - protein, 11 aa, Artificial
  IGFBP-2 heparin binding domain-containing peptide sequence
HKHIGVENPKK

SEQ ID NO: 686 - protein, 11 aa, Artificial
  IGFBP-2 heparin binding domain-containing peptide sequence
KRHIGVENPKK

SEQ ID NO: 687 - protein, 11 aa, Artificial
  IGFBP-2 heparin binding domain-containing peptide sequence
RRHIGVENPKK

SEQ ID NO: 688 - protein, 11 aa, Artificial
  IGFBP-2 heparin binding domain-containing peptide sequence
HRHIGVENPKK

SEQ ID NO: 689 - protein, 11 aa, Artificial
  IGFBP-2 heparin binding domain-containing peptide sequence
KHKIGVENPKK

SEQ ID NO: 690 - protein, 11 aa, Artificial
  IGFBP-2 heparin binding domain-containing peptide sequence
RHKIGVENPKK

SEQ ID NO: 691 - protein, 11 aa, Artificial
  IGFBP-2 heparin binding domain-containing peptide sequence
HHKIGVENPKK

SEQ ID NO: 692 - protein, 11 aa, Artificial
  IGFBP-2 heparin binding domain-containing peptide sequence
KKKIGVENPKK

SEQ ID NO: 693 - protein, 11 aa, Artificial
  IGFBP-2 heparin binding domain-containing peptide sequence
RKKIGVENPKK

SEQ ID NO: 694 - protein, 11 aa, Artificial
  IGFBP-2 heparin binding domain-containing peptide sequence
HKKIGVENPKK

SEQ ID NO: 695 - protein, 11 aa, Artificial
  IGFBP-2 heparin binding domain-containing peptide sequence
KRKIGVENPKK

SEQ ID NO: 696 - protein, 11 aa, Artificial
  IGFBP-2 heparin binding domain-containing peptide sequence
RRKIGVENPKK

SEQ ID NO: 697 - protein, 11 aa, Artificial
  IGFBP-2 heparin binding domain-containing peptide sequence
HRKIGVENPKK

SEQ ID NO: 698 - protein, 11 aa, Artificial
  IGFBP-2 heparin binding domain-containing peptide sequence
KHRIGVENPKK

SEQ ID NO: 699 - protein, 11 aa, Artificial
  IGFBP-2 heparin binding domain-containing peptide sequence
RHRIGVENPKK

SEQ ID NO: 700 - protein, 11 aa, Artificial
  IGFBP-2 heparin binding domain-containing peptide sequence
HHRIGVENPKK

SEQ ID NO: 701 - protein, 11 aa, Artificial
  IGFBP-2 heparin binding domain-containing peptide sequence
KKRIGVENPKK

SEQ ID NO: 702 - protein, 11 aa, Artificial
  IGFBP-2 heparin binding domain-containing peptide sequence
RKRIGVENPKK

SEQ ID NO: 703 - protein, 11 aa, Artificial
  IGFBP-2 heparin binding domain-containing peptide sequence
HKRIGVENPKK

SEQ ID NO: 704 - protein, 11 aa, Artificial
  IGFBP-2 heparin binding domain-containing peptide sequence
KRRIGVENPKK

SEQ ID NO: 705 - protein, 11 aa, Artificial
  IGFBP-2 heparin binding domain-containing peptide sequence
RRRIGVENPKK

SEQ ID NO: 706 - protein, 11 aa, Artificial
  IGFBP-2 heparin binding domain-containing peptide sequence
HRRIGVENPKK

SEQ ID NO: 707 - protein, 11 aa, Artificial
  IGFBP-2 heparin binding domain-containing peptide sequence
KHHVGVENPKK

SEQ ID NO: 708 - protein, 11 aa, Artificial
  IGFBP-2 heparin binding domain-containing peptide sequence
RHHVGVENPKK

SEQ ID NO: 709 - protein, 11 aa, Artificial
  IGFBP-2 heparin binding domain-containing peptide sequence
HHHVGVENPKK

SEQ ID NO: 710 - protein, 11 aa, Artificial
  IGFBP-2 heparin binding domain-containing peptide sequence
KKHVGVENPKK

SEQ ID NO: 711 - protein, 11 aa, Artificial
  IGFBP-2 heparin binding domain-containing peptide sequence
RKHVGVENPKK

SEQ ID NO: 712 - protein, 11 aa, Artificial
  IGFBP-2 heparin binding domain-containing peptide sequence
HKHVGVENPKK

SEQ ID NO: 713 - protein, 11 aa, Artificial
  IGFBP-2 heparin binding domain-containing peptide sequence
KRHVGVENPKK

SEQ ID NO: 714 - protein, 11 aa, Artificial
  IGFBP-2 heparin binding domain-containing peptide sequence
RRHVGVENPKK

SEQ ID NO: 715 - protein, 11 aa, Artificial
  IGFBP-2 heparin binding domain-containing peptide sequence
HRHVGVENPKK

SEQ ID NO: 716 - protein, 11 aa, Artificial
  IGFBP-2 heparin binding domain-containing peptide sequence
KHKVGVENPKK

SEQ ID NO: 717 - protein, 11 aa, Artificial
  IGFBP-2 heparin binding domain-containing peptide sequence
RHKVGVENPKK

SEQ ID NO: 718 - protein, 11 aa, Artificial
  IGFBP-2 heparin binding domain-containing peptide sequence
HHKVGVENPKK

SEQ ID NO: 719 - protein, 11 aa, Artificial
  IGFBP-2 heparin binding domain-containing peptide sequence
KKKVGVENPKK

SEQ ID NO: 720 - protein, 11 aa, Artificial
  IGFBP-2 heparin binding domain-containing peptide sequence
RKKVGVENPKK

SEQ ID NO: 721 - protein, 11 aa, Artificial
  IGFBP-2 heparin binding domain-containing peptide sequence
HKKVGVENPKK

SEQ ID NO: 722 - protein, 11 aa, Artificial
  IGFBP-2 heparin binding domain-containing peptide sequence
KRKVGVENPKK

SEQ ID NO: 723 - protein, 11 aa, Artificial
  IGFBP-2 heparin binding domain-containing peptide sequence
RRKVGVEEPKK

SEQ ID NO: 724 - protein, 11 aa, Artificial
  IGFBP-2 heparin binding domain-containing peptide sequence
HRKVGVENPKK

SEQ ID NO: 725 - protein, 11 aa, Artificial
  IGFBP-2 heparin binding domain-containing peptide sequence
KHRVGVENPKK

SEQ ID NO: 726 - protein, 11 aa, Artificial
  IGFBP-2 heparin binding domain-containing peptide sequence
RHRVGVENPKK

SEQ ID NO: 727 - protein, 11 aa, Artificial
  IGFBP-2 heparin binding domain-containing peptide sequence
HHRVGVENPKK

SEQ ID NO: 728 - protein, 11 aa, Artificial
  IGFBP-2 heparin binding domain-containing peptide sequence
KKRVGVENPKK

SEQ ID NO: 729 - protein, 11 aa, Artificial
  IGFBP-2 heparin binding domain-containing peptide sequence
RKRVGVENPKK

SEQ ID NO: 730 - protein, 11 aa, Artificial
  IGFBP-2 heparin binding domain-containing peptide sequence
HKRVGVENPKK

SEQ ID NO: 731 - protein, 11 aa, Artificial
  IGFBP-2 heparin binding domain-containing peptide sequence
KRRVGVENPKK

SEQ ID NO: 732 - protein, 11 aa, Artificial
  IGFBP-2 heparin binding domain-containing peptide sequence
RRRVGVENPKK

SEQ ID NO: 733 - protein, 11 aa, Artificial
  IGFBP-2 heparin binding domain-containing peptide sequence
HRRVGVENPKK

SEQ ID NO: 734 - protein, 11 aa, Artificial
  IGFBP-2 heparin binding domain-containing peptide sequence
KHHLGLNNPKK

SEQ ID NO: 735 - protein, 11 aa, Artificial
  IGFBP-2 heparin binding domain-containing peptide sequence
RHHLGLNNPKK

SEQ ID NO: 736 - protein, 11 aa, Artificial
  IGFBP-2 heparin binding domain-containing peptide sequence
HHHLGLNNPKK

SEQ ID NO: 737 - protein, 11 aa, Artificial
  IGFBP-2 heparin binding domain-containing peptide sequence
KKHLGLNNPKK

SEQ ID NO: 738 - protein, 11 aa, Artificial
  IGFBP-2 heparin binding domain-containing peptide sequence
RKHLGLNNPKK

SEQ ID NO: 739 - protein, 11 aa, Artificial
  IGFBP-2 heparin binding domain-containing peptide sequence
HKHLGLNNPKK

SEQ ID NO: 740 - protein, 11 aa, Artificial
  IGFBP-2 heparin binding domain-containing peptide sequence
KRHLGLNNPKK

SEQ ID NO: 741 - protein, 11 aa, Artificial
  IGFBP-2 heparin binding domain-containing peptide sequence
RRHLGLNNPKK

SEQ ID NO: 742 - protein, 11 aa, Artificial
  IGFBP-2 heparin binding domain-containing peptide sequence
HRHLGLNNPKK

SEQ ID NO: 743 - protein, 11 aa, Artificial
  IGFBP-2 heparin binding domain-containing peptide sequence
KHKLGLNNPKK

SEQ ID NO: 744 - protein, 11 aa, Artificial
  IGFBP-2 heparin binding domain-containing peptide sequence
RHKLGLNNPKK

SEQ ID NO: 745 - protein, 11 aa, Artificial
  IGFBP-2 heparin binding domain-containing peptide sequence
HHKLGLNNPKK

SEQ ID NO: 746 - protein, 11 aa, Artificial
  IGFBP-2 heparin binding domain-containing peptide sequence
KKKLGLNNPKK

SEQ ID NO: 747 - protein, 11 aa, Artificial
  IGFBP-2 heparin binding domain-containing peptide sequence
RKKLGLNNPKK

SEQ ID NO: 748 - protein, 11 aa, Artificial
  IGFBP-2 heparin binding domain-containing peptide sequence
HKKLGLNNPKK

SEQ ID NO: 749 - protein, 11 aa, Artificial
  IGFBP-2 heparin binding domain-containing peptide sequence
KRKLGLNNPKK

SEQ ID NO: 750 - protein, 11 aa, Artificial
  IGFBP-2 heparin binding domain-containing peptide sequence
RRKLGLNNPKK

SEQ ID NO: 751 - protein, 11 aa, Artificial
  IGFBP-2 heparin binding domain-containing peptide sequence
HRKLGLNNPKK

SEQ ID NO: 752 - protein, 11 aa, Artificial
  IGFBP-2 heparin binding domain-containing peptide sequence
KHRLGLNNPKK

SEQ ID NO: 753 - protein, 11 aa, Artificial
  IGFBP-2 heparin binding domain-containing peptide sequence
RHRLGLNNPKK

SEQ ID NO: 754 - protein, 11 aa, Artificial
  IGFBP-2 heparin binding domain-containing peptide sequence
HHRLGLNNPKK

SEQ ID NO: 755 - protein, 11 aa, Artificial
  IGFBP-2 heparin binding domain-containing peptide sequence
KKRLGLNNPKK

SEQ ID NO: 756 - protein, 11 aa, Artificial
  IGFBP-2 heparin binding domain-containing peptide sequence
RKRLGLNNPKK

SEQ ID NO: 757 - protein, 11 aa, Artificial
  IGFBP-2 heparin binding domain-containing peptide sequence
HKRLGLNNPKK

SEQ ID NO: 758 - protein, 11 aa, Artificial
  IGFBP-2 heparin binding domain-containing peptide sequence
KRRLGLNNPKK

SEQ ID NO: 759 - protein, 11 aa, Artificial
  IGFBP-2 heparin binding domain-containing peptide sequence
RRRLGLNNPKK

SEQ ID NO: 760 - protein, 11 aa, Artificial
  IGFBP-2 heparin binding domain-containing peptide sequence
HRRLGLNNPKK

SEQ ID NO: 761 - protein, 11 aa, Artificial
  IGFBP-2 heparin binding domain-containing peptide sequence
KHHIGLNNPKK

SEQ ID NO: 762 - protein, 11 aa, Artificial
  IGFBP-2 heparin binding domain-containing peptide sequence
RHHIGLNNPKK

SEQ ID NO: 763 - protein, 11 aa, Artificial
  IGFBP-2 heparin binding domain-containing peptide sequence
HHHIGLNNPKK

SEQ ID NO: 764 - protein, 11 aa, Artificial
  IGFBP-2 heparin binding domain-containing peptide sequence
KKHIGLNNPKK

SEQ ID NO: 765 - protein, 11 aa, Artificial
  IGFBP-2 heparin binding domain-containing peptide sequence
RKHIGLNNPKK

SEQ ID NO: 766 - protein, 11 aa, Artificial
  IGFBP-2 heparin binding domain-containing peptide sequence
HKHIGLNNPKK

SEQ ID NO: 767 - protein, 11 aa, Artificial
  IGFBP-2 heparin binding domain-containing peptide sequence
KRHIGLNNPKK

SEQ ID NO: 768 - protein, 11 aa, Artificial
  IGFBP-2 heparin binding domain-containing peptide sequence
RRHIGLNNPKK

SEQ ID NO: 769 - protein, 11 aa, Artificial
  IGFBP-2 heparin binding domain-containing peptide sequence
HRHIGLNNPKK

SEQ ID NO: 770 - protein, 11 aa, Artificial
  IGFBP-2 heparin binding domain-containing peptide sequence
KHKIGLNNPKK

SEQ ID NO: 771 - protein, 11 aa, Artificial
  IGFBP-2 heparin binding domain-containing peptide sequence
RHKIGLNNPKK

SEQ ID NO: 772 - protein, 11 aa, Artificial
  IGFBP-2 heparin binding domain-containing peptide sequence
HHKIGLNNPKK

SEQ ID NO: 773 - protein, 11 aa, Artificial
  IGFBP-2 heparin binding domain-containing peptide sequence
KKKIGLNNPKK

SEQ ID NO: 774 - protein, 11 aa, Artificial
  IGFBP-2 heparin binding domain-containing peptide sequence
RKKIGLNNPKK

SEQ ID NO: 775 - protein, 11 aa, Artificial
  IGFBP-2 heparin binding domain-containing peptide sequence
HKKIGLNNPKK

SEQ ID NO: 776 - protein, 11 aa, Artificial
  IGFBP-2 heparin binding domain-containing peptide sequence
KRKIGLNNPKK

SEQ ID NO: 777 - protein, 11 aa, Artificial
  IGFBP-2 heparin binding domain-containing peptide sequence
RRKIGLNNPKK

SEQ ID NO: 778 - protein, 11 aa, Artificial
  IGFBP-2 heparin binding domain-containing peptide sequence
HRKIGLNNPKK

SEQ ID NO: 779 - protein, 11 aa, Artificial
  IGFBP-2 heparin binding domain-containing peptide sequence
KHRIGLNNPKK

SEQ ID NO: 780 - protein, 11 aa, Artificial
  IGFBP-2 heparin binding domain-containing peptide sequence
RHRIGLNNPKK

SEQ ID NO: 781 - protein, 11 aa, Artificial
  IGFBP-2 heparin binding domain-containing peptide sequence
HHRIGLNNPKK

SEQ ID NO: 782 - protein, 11 aa, Artificial
  IGFBP-2 heparin binding domain-containing peptide sequence
KKRIGLNNPKK

SEQ ID NO: 783 - protein, 11 aa, Artificial
  IGFBP-2 heparin binding domain-containing peptide sequence
RKRIGLNNPKK

SEQ ID NO: 784 - protein, 11 aa, Artificial
  IGFBP-2 heparin binding domain-containing peptide sequence
HKRIGLNNPKK

SEQ ID NO: 785 - protein, 11 aa, Artificial
  IGFBP-2 heparin binding domain-containing peptide sequence
KRRIGLNNPKK

SEQ ID NO: 786 - protein, 11 aa, Artificial
  IGFBP-2 heparin binding domain-containing peptide sequence
RRRIGLNNPKK

SEQ ID NO: 787 - protein, 11 aa, Artificial
  IGFBP-2 heparin binding domain-containing peptide sequence
HRRIGLNNPKK

SEQ ID NO: 788 - protein, 11 aa, Artificial
  IGFBP-2 heparin binding domain-containing peptide sequence
KHHVGLNNPKK

SEQ ID NO: 789 - protein, 11 aa, Artificial
  IGFBP-2 heparin binding domain-containing peptide sequence
RHHVGLNNPKK

SEQ ID NO: 790 - protein, 11 aa, Artificial
  IGFBP-2 heparin binding domain-containing peptide sequence
HHHVGLNNPKK

SEQ ID NO: 791 - protein, 11 aa, Artificial
  IGFBP-2 heparin binding domain-containing peptide sequence
KKHVGLNNPKK

SEQ ID NO: 792 - protein, 11 aa, Artificial
  IGFBP-2 heparin binding domain-containing peptide sequence
RKHVGLNNPKK

SEQ ID NO: 793 - protein, 11 aa, Artificial
  IGFBP-2 heparin binding domain-containing peptide sequence
HKHVGLNNPKK

SEQ ID NO: 794 - protein, 11 aa, Artificial
  IGFBP-2 heparin binding domain-containing peptide sequence
KRHVGLNNPKK

SEQ ID NO: 795 - protein, 11 aa, Artificial
  IGFBP-2 heparin binding domain-containing peptide sequence
RRHVGLNNPKK

SEQ ID NO: 796 - protein, 11 aa, Artificial
  IGFBP-2 heparin binding domain-containing peptide sequence
HRHVGLNNPKK

SEQ ID NO: 797 - protein, 11 aa, Artificial
  IGFBP-2 heparin binding domain-containing peptide sequence
KHKVGLNNPKK

SEQ ID NO: 798 - protein, 11 aa, Artificial
  IGFBP-2 heparin binding domain-containing peptide sequence
RHKVGLNNPKK

SEQ ID NO: 799 - protein, 11 aa, Artificial
  IGFBP-2 heparin binding domain-containing peptide sequence
HHKVGLNNPKK

SEQ ID NO: 800 - protein, 11 aa, Artificial
  IGFBP-2 heparin binding domain-containing peptide sequence
KKKVGLNNPKK

SEQ ID NO: 801 - protein, 11 aa, Artificial
  IGFBP-2 heparin binding domain-containing peptide sequence
RKKVGLNNPKK

SEQ ID NO: 802 - protein, 11 aa, Artificial
  IGFBP-2 heparin binding domain-containing peptide sequence
HKKVGLNNPKK

SEQ ID NO: 803 - protein, 11 aa, Artificial
  IGFBP-2 heparin binding domain-containing peptide sequence
KRKVGLNNPKK

SEQ ID NO: 804 - protein, 11 aa, Artificial
  IGFBP-2 heparin binding domain-containing peptide sequence
RRKVGLNNPKK

SEQ ID NO: 805 - protein, 11 aa, Artificial
  IGFBP-2 heparin binding domain-containing peptide sequence
HRKVGLNNPKK

SEQ ID NO: 806 - protein, 11 aa, Artificial
  IGFBP-2 heparin binding domain-containing peptide sequence
KHRVGLNNPKK

SEQ ID NO: 807 - protein, 11 aa, Artificial
  IGFBP-2 heparin binding domain-containing peptide sequence
RHRVGLNNPKK

SEQ ID NO: 808 - protein, 11 aa, Artificial
  IGFBP-2 heparin binding domain-containing peptide sequence
HHRVGLNNPKK

SEQ ID NO: 809 - protein, 11 aa, Artificial
  IGFBP-2 heparin binding domain-containing peptide sequence
KKRVGLNNPKK

SEQ ID NO: 810 - protein, 11 aa, Artificial
  IGFBP-2 heparin binding domain-containing peptide sequence
RKRVGLNNPKK

SEQ ID NO: 811 - protein, 11 aa, Artificial
  IGFBP-2 heparin binding domain-containing peptide sequence
HKRVGLNNPKK

SEQ ID NO: 812 - protein, 11 aa, Artificial
  IGFBP-2 heparin binding domain-containing peptide sequence
KRRVGLNNPKK

SEQ ID NO: 813 - protein, 11 aa, Artificial
  IGFBP-2 heparin binding domain-containing peptide sequence
RRRVGLNNPKK

SEQ ID NO: 814 - protein, 11 aa, Artificial
  IGFBP-2 heparin binding domain-containing peptide sequence
HRRVGLNNPKK

SEQ ID NO: 815 - protein, 11 aa, Artificial
  IGFBP-2 heparin binding domain-containing peptide sequence
KHHLGINNPKK

SEQ ID NO: 816 - protein, 11 aa, Artificial
  IGFBP-2 heparin binding domain-containing peptide sequence
RHHLGINNPKK

SEQ ID NO: 817 - protein, 11 aa, Artificial
  IGFBP-2 heparin binding domain-containing peptide sequence
HHHLGINNPKK

SEQ ID NO: 818 - protein, 11 aa, Artificial
  IGFBP-2 heparin binding domain-containing peptide sequence
KKHLGINNPKK

SEQ ID NO: 819 - protein, 11 aa, Artificial
  IGFBP-2 heparin binding domain-containing peptide sequence
RKHLGINNPKK

SEQ ID NO: 820 - protein, 11 aa, Artificial
  IGFBP-2 heparin binding domain-containing peptide sequence
HKHLGINNPKK

SEQ ID NO: 821 - protein, 11 aa, Artificial
  IGFBP-2 heparin binding domain-containing peptide sequence
KRHLGINNPKK

SEQ ID NO: 822 - protein, 11 aa, Artificial
  IGFBP-2 heparin binding domain-containing peptide sequence
RRHLGINNPKK

SEQ ID NO: 823 - protein, 11 aa, Artificial
  IGFBP-2 heparin binding domain-containing peptide sequence
HRHLGINNPKK

SEQ ID NO: 824 - protein, 11 aa, Artificial
  IGFBP-2 heparin binding domain-containing peptide sequence
KHKLGINNPKK

SEQ ID NO: 825 - protein, 11 aa, Artificial
  IGFBP-2 heparin binding domain-containing peptide sequence
RHKLGINNPKK

SEQ ID NO: 826 - protein, 11 aa, Artificial
  IGFBP-2 heparin binding domain-containing peptide sequence
HHKLGINNPKK

SEQ ID NO: 827 - protein, 11 aa, Artificial
  IGFBP-2 heparin binding domain-containing peptide sequence
KKKLGINNPKK

SEQ ID NO: 828 - protein, 11 aa, Artificial
  IGFBP-2 heparin binding domain-containing peptide sequence
RKKLGINNPKK

SEQ ID NO: 829 - protein, 11 aa, Artificial
  IGFBP-2 heparin binding domain-containing peptide sequence
HKKLGINNPKK

SEQ ID NO: 830 - protein, 11 aa, Artificial
  IGFBP-2 heparin binding domain-containing peptide sequence
KRKLGINNPKK

SEQ ID NO: 831 - protein, 11 aa, Artificial
  IGFBP-2 heparin binding domain-containing peptide sequence
RRKLGINNPKK

SEQ ID NO: 832 - protein, 11 aa, Artificial
  IGFBP-2 heparin binding domain-containing peptide sequence
HRKLGINNPKK

SEQ ID NO: 833 - protein, 11 aa, Artificial
  IGFBP-2 heparin binding domain-containing peptide sequence
KHRLGINNPKK

SEQ ID NO: 834 - protein, 11 aa, Artificial
  IGFBP-2 heparin binding domain-containing peptide sequence
RHRLGINNPKK

SEQ ID NO: 835 - protein, 11 aa, Artificial
  IGFBP-2 heparin binding domain-containing peptide sequence
HHRLGINNPKK

SEQ ID NO: 836 - protein, 11 aa, Artificial
  IGFBP-2 heparin binding domain-containing peptide sequence
KKRLGINNPKK

SEQ ID NO: 837 - protein, 11 aa, Artificial
  IGFBP-2 heparin binding domain-containing peptide sequence
RKRLGINNPKK

SEQ ID NO: 838 - protein, 11 aa, Artificial
  IGFBP-2 heparin binding domain-containing peptide sequence
HKRLGINNPKK

SEQ ID NO: 839 - protein, 11 aa, Artificial
  IGFBP-2 heparin binding domain-containing peptide sequence
KRRLGINNPKK

SEQ ID NO: 840 - protein, 11 aa, Artificial
  IGFBP-2 heparin binding domain-containing peptide sequence
RRRLGINNPKK

SEQ ID NO: 841 - protein, 11 aa, Artificial
  IGFBP-2 heparin binding domain-containing peptide sequence
HRRLGINNPKK

SEQ ID NO: 842 - protein, 11 aa, Artificial
  IGFBP-2 heparin binding domain-containing peptide sequence
KHHIGIENPKK

SEQ ID NO: 843 - protein, 11 aa, Artificial
  IGFBP-2 heparin binding domain-containing peptide sequence
RHHIGINNPKK

SEQ ID NO: 844 - protein, 11 aa, Artificial
  IGFBP-2 heparin binding domain-containing peptide sequence
HHHIGINNPKK

SEQ ID NO: 845 - protein, 11 aa, Artificial
  IGFBP-2 heparin binding domain-containing peptide sequence
KKHIGINNPKK

SEQ ID NO: 846 - protein, 11 aa, Artificial
  IGFBP-2 heparin binding domain-containing peptide sequence
RKHIGINNPKK

SEQ ID NO: 847 - protein, 11 aa, Artificial
  IGFBP-2 heparin binding domain-containing peptide sequence
HKHIGINNPKK

SEQ ID NO: 848 - protein, 11 aa, Artificial
  IGFBP-2 heparin binding domain-containing peptide sequence
KRHIGINNPKK

SEQ ID NO: 849 - protein, 11 aa, Artificial
  IGFBP-2 heparin binding domain-containing peptide sequence
RRHIGINNPKK

SEQ ID NO: 850 - protein, 11 aa, Artificial
  IGFBP-2 heparin binding domain-containing peptide sequence
HRHIGINNPKK

SEQ ID NO: 851 - protein, 11 aa, Artificial
  IGFBP-2 heparin binding domain-containing peptide sequence
KHKIGINNPKK

SEQ ID NO: 852 - protein, 11 aa, Artificial
  IGFBP-2 heparin binding domain-containing peptide sequence
RHKIGINNPKK

SEQ ID NO: 853 - protein, 11 aa, Artificial
  IGFBP-2 heparin binding domain-containing peptide sequence
HHKIGINNPKK

SEQ ID NO: 854 - protein, 11 aa, Artificial
  IGFBP-2 heparin binding domain-containing peptide sequence
KKKIGINNPKK

SEQ ID NO: 855 - protein, 11 aa, Artificial
  IGFBP-2 heparin binding domain-containing peptide sequence
RKKIGINNPKK

SEQ ID NO: 856 - protein, 11 aa, Artificial
  IGFBP-2 heparin binding domain-containing peptide sequence
HKKIGINNPKK

SEQ ID NO: 857 - protein, 11 aa, Artificial
  IGFBP-2 heparin binding domain-containing peptide sequence
KRKIGINNPKK

SEQ ID NO: 858 - protein, 11 aa, Artificial
  IGFBP-2 heparin binding domain-containing peptide sequence
RRKIGINNPKK

SEQ ID NO: 859 - protein, 11 aa, Artificial
  IGFBP-2 heparin binding domain-containing peptide sequence
HRKIGINNPKK

SEQ ID NO: 860 - protein, 11 aa, Artificial
  IGFBP-2 heparin binding domain-containing peptide sequence
KHRIGINNPKK

SEQ ID NO: 861 - protein, 11 aa, Artificial
  IGFBP-2 heparin binding domain-containing peptide sequence
RHRIGINNPKK

SEQ ID NO: 862 - protein, 11 aa, Artificial
  IGFBP-2 heparin binding domain-containing peptide sequence
HHRIGINNPKK

SEQ ID NO: 863 - protein, 11 aa, Artificial
  IGFBP-2 heparin binding domain-containing peptide sequence
KKRIGINNPKK

SEQ ID NO: 864 - protein, 11 aa, Artificial
  IGFBP-2 heparin binding domain-containing peptide sequence
RKRIGINNPKK

SEQ ID NO: 865 - protein, 11 aa, Artificial
  IGFBP-2 heparin binding domain-containing peptide sequence
HKRIGINNPKK

SEQ ID NO: 866 - protein, 11 aa, Artificial
  IGFBP-2 heparin binding domain-containing peptide sequence
KRRIGINNPKK

SEQ ID NO: 867 - protein, 11 aa, Artificial
  IGFBP-2 heparin binding domain-containing peptide sequence
RRRIGINNPKK

SEQ ID NO: 868 - protein, 11 aa, Artificial
  IGFBP-2 heparin binding domain-containing peptide sequence
HRRIGINNPKK

SEQ ID NO: 869 - protein, 11 aa, Artificial
  IGFBP-2 heparin binding domain-containing peptide sequence
KHHVGINNPKK

SEQ ID NO: 870 - protein, 11 aa, Artificial
  IGFBP-2 heparin binding domain-containing peptide sequence
RHHVGINNPKK

SEQ ID NO: 871 - protein, 11 aa, Artificial
  IGFBP-2 heparin binding domain-containing peptide sequence
HHHVGINNPKK

SEQ ID NO: 872 - protein, 11 aa, Artificial
  IGFBP-2 heparin binding domain-containing peptide sequence
KKHVGINNPKK

SEQ ID NO: 873 - protein, 11 aa, Artificial
  IGFBP-2 heparin binding domain-containing peptide sequence
RKHVGINNPKK

SEQ ID NO: 874 - protein, 11 aa, Artificial
  IGFBP-2 heparin binding domain-containing peptide sequence
HKHVGINNPKK

SEQ ID NO: 875 - protein, 11 aa, Artificial
  IGFBP-2 heparin binding domain-containing peptide sequence
KRHVGINNPKK

SEQ ID NO: 876 - protein, 11 aa, Artificial
  IGFBP-2 heparin binding domain-containing peptide sequence
RRHVGINNPKK

SEQ ID NO: 877 - protein, 11 aa, Artificial
  IGFBP-2 heparin binding domain-containing peptide sequence
HRHVGINNPKK

SEQ ID NO: 878 - protein, 11 aa, Artificial
  IGFBP-2 heparin binding domain-containing peptide sequence
KHKVGINNPKK

SEQ ID NO: 879 - protein, 11 aa, Artificial
  IGFBP-2 heparin binding domain-containing peptide sequence
RHKVGINNPKK

SEQ ID NO: 880 - protein, 11 aa, Artificial
  IGFBP-2 heparin binding domain-containing peptide sequence
HHKVGINNPKK

SEQ ID NO: 881 - protein, 11 aa, Artificial
  IGFBP-2 heparin binding domain-containing peptide sequence
KKKVGINNPKK

SEQ ID NO: 882 - protein, 11 aa, Artificial
  IGFBP-2 heparin binding domain-containing peptide sequence
RKKVGINNPKK

SEQ ID NO: 883 - protein, 11 aa, Artificial
  IGFBP-2 heparin binding domain-containing peptide sequence
HKKVGINNPKK

SEQ ID NO: 884 - protein, 11 aa, Artificial
  IGFBP-2 heparin binding domain-containing peptide sequence
KRKVGINNPKK

SEQ ID NO: 885 - protein, 11 aa, Artificial
  IGFBP-2 heparin binding domain-containing peptide sequence
RRKVGINNPKK

SEQ ID NO: 886 - protein, 11 aa, Artificial
  IGFBP-2 heparin binding domain-containing peptide sequence
HRKVGINNPKK

SEQ ID NO: 887 - protein, 11 aa, Artificial
  IGFBP-2 heparin binding domain-containing peptide sequence
KHRVGINNPKK

SEQ ID NO: 888 - protein, 11 aa, Artificial
  IGFBP-2 heparin binding domain-containing peptide sequence
RHRVGINNPKK

SEQ ID NO: 889 - protein, 11 aa, Artificial
  IGFBP-2 heparin binding domain-containing peptide sequence
HHRVGINNPKK

SEQ ID NO: 890 - protein, 11 aa, Artificial
  IGFBP-2 heparin binding domain-containing peptide sequence
KKRVGINNPKK

SEQ ID NO: 891 - protein, 11 aa, Artificial
  IGFBP-2 heparin binding domain-containing peptide sequence
RKRVGINNPKK

SEQ ID NO: 892 - protein, 11 aa, Artificial
  IGFBP-2 heparin binding domain-containing peptide sequence
HKRVGINNPKK

SEQ ID NO: 893 - protein, 11 aa, Artificial
  IGFBP-2 heparin binding domain-containing peptide sequence
KRRVGINNPKK

SEQ ID NO: 894 - protein, 11 aa, Artificial
  IGFBP-2 heparin binding domain-containing peptide sequence
RRRVGINNPKK

SEQ ID NO: 895 - protein, 11 aa, Artificial
  IGFBP-2 heparin binding domain-containing peptide sequence
HRRVGINNPKK

SEQ ID NO: 896 - protein, 11 aa, Artificial
  IGFBP-2 heparin binding domain-containing peptide sequence
KHHLGVNNPKK

SEQ ID NO: 897 - protein, 11 aa, Artificial
  IGFBP-2 heparin binding domain-containing peptide sequence
RHHLGVNNPKK

SEQ ID NO: 898 - protein, 11 aa, Artificial
  IGFBP-2 heparin binding domain-containing peptide sequence
HHHLGVNNPKK

SEQ ID NO: 899 - protein, 11 aa, Artificial
  IGFBP-2 heparin binding domain-containing peptide sequence
KKHLGVNNPKK

SEQ ID NO: 900 - protein, 11 aa, Artificial
  IGFBP-2 heparin binding domain-containing peptide sequence
RKHLGVNNPKK

SEQ ID NO: 901 - protein, 11 aa, Artificial
  IGFBP-2 heparin binding domain-containing peptide sequence
HKHLGVNNPKK

SEQ ID NO: 902 - protein, 11 aa, Artificial
  IGFBP-2 heparin binding domain-containing peptide sequence
KRHLGVNNPKK

SEQ ID NO: 903 - protein, 11 aa, Artificial
  IGFBP-2 heparin binding domain-containing peptide sequence
RRHLGVNNPKK

SEQ ID NO: 904 - protein, 11 aa, Artificial
  IGFBP-2 heparin binding domain-containing peptide sequence
HRHLGVNNPKK

SEQ ID NO: 905 - protein, 11 aa, Artificial
  IGFBP-2 heparin binding domain-containing peptide sequence
KHKLGVNNPKK

SEQ ID NO: 906 - protein, 11 aa, Artificial
  IGFBP-2 heparin binding domain-containing peptide sequence
RHKLGVNNPKK

SEQ ID NO: 907 - protein, 11 aa, Artificial
  IGFBP-2 heparin binding domain-containing peptide sequence
HHKLGVNNPKK

SEQ ID NO: 908 - protein, 11 aa, Artificial
  IGFBP-2 heparin binding domain-containing peptide sequence
KKKLGVNNPKK

SEQ ID NO: 909 - protein, 11 aa, Artificial
  IGFBP-2 heparin binding domain-containing peptide sequence
RKKLGVNNPKK

SEQ ID NO: 910 - protein, 11 aa, Artificial
  IGFBP-2 heparin binding domain-containing peptide sequence
HKKLGVNNPKK

SEQ ID NO: 911 - protein, 11 aa, Artificial
  IGFBP-2 heparin binding domain-containing peptide sequence
KRKLGVNNPKK

SEQ ID NO: 912 - protein, 11 aa, Artificial
  IGFBP-2 heparin binding domain-containing peptide sequence
RRKLGVNNPKK

SEQ ID NO: 913 - protein, 11 aa, Artificial
  IGFBP-2 heparin binding domain-containing peptide sequence
HRKLGVNNPKK

SEQ ID NO: 914 - protein, 11 aa, Artificial
  IGFBP-2 heparin binding domain-containing peptide sequence
KHRLGVNNPKK

SEQ ID NO: 915 - protein, 11 aa, Artificial
  IGFBP-2 heparin binding domain-containing peptide sequence
RHRLGVNNPKK

SEQ ID NO: 916 - protein, 11 aa, Artificial
  IGFBP-2 heparin binding domain-containing peptide sequence
HHRLGVNNPKK

SEQ ID NO: 917 - protein, 11 aa, Artificial
  IGFBP-2 heparin binding domain-containing peptide sequence
KKRLGVNNPKK

SEQ ID NO: 918 - protein, 11 aa, Artificial
  IGFBP-2 heparin binding domain-containing peptide sequence
RKRLGVNNPKK

SEQ ID NO: 919 - protein, 11 aa, Artificial
  IGFBP-2 heparin binding domain-containing peptide sequence
HKRLGVNNPKK

SEQ ID NO: 920 - protein, 11 aa, Artificial
  IGFBP-2 heparin binding domain-containing peptide sequence
KRRLGVNNPKK

SEQ ID NO: 921 - protein, 11 aa, Artificial
  IGFBP-2 heparin binding domain-containing peptide sequence
RRRLGVNNPKK

SEQ ID NO: 922 - protein, 11 aa, Artificial
  IGFBP-2 heparin binding domain-containing peptide sequence
HRRLGVNNPKK

SEQ ID NO: 923 - protein, 11 aa, Artificial
  IGFBP-2 heparin binding domain-containing peptide sequence
KHHIGVNNPKK

SEQ ID NO: 924 - protein, 11 aa, Artificial
  IGFBP-2 heparin binding domain-containing peptide sequence
RHHIGVNNPKK

SEQ ID NO: 925 - protein, 11 aa, Artificial
  IGFBP-2 heparin binding domain-containing peptide sequence
HHHIGVNNPKK

SEQ ID NO: 926 - protein, 11 aa, Artificial
  IGFBP-2 heparin binding domain-containing peptide sequence
KKHIGVNNPKK

SEQ ID NO: 927 - protein, 11 aa, Artificial
  IGFBP-2 heparin binding domain-containing peptide sequence
RKHIGVNNPKK

SEQ ID NO: 928 - protein, 11 aa, Artificial
  IGFBP-2 heparin binding domain-containing peptide sequence
HKHIGVNNPKK

SEQ ID NO: 929 - protein, 11 aa, Artificial
  IGFBP-2 heparin binding domain-containing peptide sequence
KRHIGVNNPKK

SEQ ID NO: 930 - protein, 11 aa, Artificial
  IGFBP-2 heparin binding domain-containing peptide sequence
RRHIGVNNPKK

SEQ ID NO: 931 - protein, 11 aa, Artificial
  IGFBP-2 heparin binding domain-containing peptide sequence
HRHIGVNNPKK

SEQ ID NO: 932 - protein, 11 aa, Artificial
  IGFBP-2 heparin binding domain-containing peptide sequence
KHKIGVNNPKK

SEQ ID NO: 933 - protein, 11 aa, Artificial
  IGFBP-2 heparin binding domain-containing peptide sequence
RHKIGVNNPKK

SEQ ID NO: 934 - protein, 11 aa, Artificial
  IGFBP-2 heparin binding domain-containing peptide sequence
HHKIGVNNPKK

SEQ ID NO: 935 - protein, 11 aa, Artificial
  IGFBP-2 heparin binding domain-containing peptide sequence
KKKIGVNNPKK

SEQ ID NO: 936 - protein, 11 aa, Artificial
  IGFBP-2 heparin binding domain-containing peptide sequence
RKKIGVNNPKK

SEQ ID NO: 937 - protein, 11 aa, Artificial
  IGFBP-2 heparin binding domain-containing peptide sequence
HKKIGVNNPKK

SEQ ID NO: 938 - protein, 11 aa, Artificial
  IGFBP-2 heparin binding domain-containing peptide sequence
KRKIGVNNPKK

SEQ ID NO: 939 - protein, 11 aa, Artificial
  IGFBP-2 heparin binding domain-containing peptide sequence
RRKIGVNNPKK

SEQ ID NO: 940 - protein, 11 aa, Artificial
  IGFBP-2 heparin binding domain-containing peptide sequence
HRKIGVNNPKK

SEQ ID NO: 941 - protein, 11 aa, Artificial
  IGFBP-2 heparin binding domain-containing peptide sequence
KHRIGVNNPKK

SEQ ID NO: 942 - protein, 11 aa, Artificial
  IGFBP-2 heparin binding domain-containing peptide sequence
RHRIGVNNPKK

SEQ ID NO: 943 - protein, 11 aa, Artificial
  IGFBP-2 heparin binding domain-containing peptide sequence
HHRIGVNNPKK

SEQ ID NO: 944 - protein, 11 aa, Artificial
  IGFBP-2 heparin binding domain-containing peptide sequence
KKRIGVNNPKK

SEQ ID NO: 945 - protein, 11 aa, Artificial
  IGFBP-2 heparin binding domain-containing peptide sequence
RKRIGVNNPKK

SEQ ID NO: 946 - protein, 11 aa, Artificial
  IGFBP-2 heparin binding domain-containing peptide sequence
HKRIGVNNPKK

SEQ ID NO: 947 - protein, 11 aa, Artificial
  IGFBP-2 heparin binding domain-containing peptide sequence
KRRIGVNNPKK

SEQ ID NO: 948 - protein, 11 aa, Artificial
  IGFBP-2 heparin binding domain-containing peptide sequence
RRRIGVNNPKK

SEQ ID NO: 949 - protein, 11 aa, Artificial
  IGFBP-2 heparin binding domain-containing peptide sequence
HRRIGVNNPKK

SEQ ID NO: 950 - protein, 11 aa, Artificial
  IGFBP-2 heparin binding domain-containing peptide sequence
KHHVGVNNPKK

SEQ ID NO: 951 - protein, 11 aa, Artificial
  IGFBP-2 heparin binding domain-containing peptide sequence
RHHVGVNNPKK

SEQ ID NO: 952 - protein, 11 aa, Artificial
  IGFBP-2 heparin binding domain-containing peptide sequence
HHHVGVNNPKK

SEQ ID NO: 953 - protein, 11 aa, Artificial
  IGFBP-2 heparin binding domain-containing peptide sequence
KKHVGVNNPKK

SEQ ID NO: 954 - protein, 11 aa, Artificial
  IGFBP-2 heparin binding domain-containing peptide sequence
RKHVGVNNPKK

SEQ ID NO: 955 - protein, 11 aa, Artificial
  IGFBP-2 heparin binding domain-containing peptide sequence
HKHVGVNNPKK

SEQ ID NO: 956 - protein, 11 aa, Artificial
  IGFBP-2 heparin binding domain-containing peptide sequence
KRHVGVNNPKK

SEQ ID NO: 957 - protein, 11 aa, Artificial
  IGFBP-2 heparin binding domain-containing peptide sequence
RRHVGVNNPKK

SEQ ID NO: 958 - protein, 11 aa, Artificial
  IGFBP-2 heparin binding domain-containing peptide sequence
HRHVGVNNPKK

SEQ ID NO: 959 - protein, 11 aa, Artificial
  IGFBP-2 heparin binding domain-containing peptide sequence
KHKVGVNNPKK

SEQ ID NO: 960 - protein, 11 aa, Artificial
  IGFBP-2 heparin binding domain-containing peptide sequence
RHKVGVNNPKK

SEQ ID NO: 961 - protein, 11 aa, Artificial
  IGFBP-2 heparin binding domain-containing peptide sequence
HHKVGVNNPKK

SEQ ID NO: 962 - protein, 11 aa, Artificial
  IGFBP-2 heparin binding domain-containing peptide sequence
KKKVGVNNPKK

SEQ ID NO: 963 - protein, 11 aa, Artificial
  IGFBP-2 heparin binding domain-containing peptide sequence
RKKVGVNNPKK

SEQ ID NO: 964 - protein, 11 aa, Artificial
  IGFBP-2 heparin binding domain-containing peptide sequence
HKKVGVNNPKK

SEQ ID NO: 965 - protein, 11 aa, Artificial
  IGFBP-2 heparin binding domain-containing peptide sequence
KRKVGVNNPKK

SEQ ID NO: 966 - protein, 11 aa, Artificial
  IGFBP-2 heparin binding domain-containing peptide sequence
RRKVGVNNPKK

SEQ ID NO: 967 - protein, 11 aa, Artificial
  IGFBP-2 heparin binding domain-containing peptide sequence
HRKVGVNNPKK

SEQ ID NO: 968 - protein, 11 aa, Artificial
  IGFBP-2 heparin binding domain-containing peptide sequence
KHRVGVNNPKK

SEQ ID NO: 969 - protein, 11 aa, Artificial
  IGFBP-2 heparin binding domain-containing peptide sequence
RHRVGVNNPKK

SEQ ID NO: 970 - protein, 11 aa, Artificial
  IGFBP-2 heparin binding domain-containing peptide sequence
HHRVGVNNPKK

SEQ ID NO: 971 - protein, 11 aa, Artificial
  IGFBP-2 heparin binding domain-containing peptide sequence
KKRVGVNNPKK

SEQ ID NO: 972 - protein, 11 aa, Artificial
  IGFBP-2 heparin binding domain-containing peptide sequence
RKRVGVNNPKK

SEQ ID NO: 973 - protein, 11 aa, Artificial
  IGFBP-2 heparin binding domain-containing peptide sequence
HKRVGVNNPKK

SEQ ID NO: 974 - protein, 11 aa, Artificial
  IGFBP-2 heparin binding domain-containing peptide sequence
KRRVGVNNPKK

SEQ ID NO: 975 - protein, 11 aa, Artificial
  IGFBP-2 heparin binding domain-containing peptide sequence
RRRVGVNNPKK

SEQ ID NO: 976 - protein, 11 aa, Artificial
  IGFBP-2 heparin binding domain-containing peptide sequence
HRRVGVNNPKK

SEQ ID NO: 977 - protein, 11 aa, Artificial
  IGFBP-2 heparin binding domain-containing peptide sequence
KHHLGLEEPKR

SEQ ID NO: 978 - protein, 11 aa, Artificial
  IGFBP-2 heparin binding domain-containing peptide sequence
RHHLGLEEPKR

SEQ ID NO: 979 - protein, 11 aa, Artificial
  IGFBP-2 heparin binding domain-containing peptide sequence
HHHLGLEEPKR

SEQ ID NO: 980 - protein, 11 aa, Artificial
  IGFBP-2 heparin binding domain-containing peptide sequence
KKHLGLEEPKR

SEQ ID NO: 981 - protein, 11 aa, Artificial
  IGFBP-2 heparin binding domain-containing peptide sequence
RKHLGLEEPKR

SEQ ID NO: 982 - protein, 11 aa, Artificial
  IGFBP-2 heparin binding domain-containing peptide sequence
HKHLGLEEPKR

SEQ ID NO: 983 - protein, 11 aa, Artificial
  IGFBP-2 heparin binding domain-containing peptide sequence
KRHLGLEEPKR

SEQ ID NO: 984 - protein, 11 aa, Artificial
  IGFBP-2 heparin binding domain-containing peptide sequence
RRHLGLEEPKR

SEQ ID NO: 985 - protein, 11 aa, Artificial
  IGFBP-2 heparin binding domain-containing peptide sequence
HRHLGLEEPKR

SEQ ID NO: 986 - protein, 11 aa, Artificial
  IGFBP-2 heparin binding domain-containing peptide sequence
KHKLGLEEPKR

SEQ ID NO: 987 - protein, 11 aa, Artificial
  IGFBP-2 heparin binding domain-containing peptide sequence
RHKLGLEEPKR

SEQ ID NO: 988 - protein, 11 aa, Artificial
  IGFBP-2 heparin binding domain-containing peptide sequence
HHKLGLEEPKR

SEQ ID NO: 989 - protein, 11 aa, Artificial
  IGFBP-2 heparin binding domain-containing peptide sequence
KKKLGLEEPKR

SEQ ID NO: 990 - protein, 11 aa, Artificial
  IGFBP-2 heparin binding domain-containing peptide sequence
RKKLGLEEPKR

SEQ ID NO: 991 - protein, 11 aa, Artificial
  IGFBP-2 heparin binding domain-containing peptide sequence
HKKLGLEEPKR

SEQ ID NO: 992 - protein, 11 aa, Artificial
  IGFBP-2 heparin binding domain-containing peptide sequence
KRKLGLEEPKR

SEQ ID NO: 993 - protein, 11 aa, Artificial
  IGFBP-2 heparin binding domain-containing peptide sequence
RRKLGLEEPKR

SEQ ID NO: 994 - protein, 11 aa, Artificial
  IGFBP-2 heparin binding domain-containing peptide sequence
HRKLGLEEPKR

SEQ ID NO: 995 - protein, 11 aa, Artificial
  IGFBP-2 heparin binding domain-containing peptide sequence
KHRLGLEEPKR

SEQ ID NO: 996 - protein, 11 aa, Artificial
  IGFBP-2 heparin binding domain-containing peptide sequence
RHRLGLEEPKR

SEQ ID NO: 997 - protein, 11 aa, Artificial
  IGFBP-2 heparin binding domain-containing peptide sequence
HHRLGLEEPKR

SEQ ID NO: 998 - protein, 11 aa, Artificial
  IGFBP-2 heparin binding domain-containing peptide sequence
KKRLGLEEPKR

SEQ ID NO: 999 - protein, 11 aa, Artificial
  IGFBP-2 heparin binding domain-containing peptide sequence
RKRLGLEEPKR

SEQ ID NO: 1000 - protein, 11 aa, Artificial
  IGFBP-2 heparin binding domain-containing peptide sequence
HKRLGLEEPKR

SEQ ID NO: 1001 - protein, 11 aa, Artificial
  IGFBP-2 heparin binding domain-containing peptide sequence
KRRLGLEEPKR

SEQ ID NO: 1002 - protein, 11 aa, Artificial
  IGFBP-2 heparin binding domain-containing peptide sequence
RRRLGLEEPKR

SEQ ID NO: 1003 - protein, 11 aa, Artificial
  IGFBP-2 heparin binding domain-containing peptide sequence
HRRLGLEEPKR

SEQ ID NO: 1004 - protein, 11 aa, Artificial
  IGFBP-2 heparin binding domain-containing peptide sequence
KHHIGLEEPKR

SEQ ID NO: 1005 - protein, 11 aa, Artificial
  IGFBP-2 heparin binding domain-containing peptide sequence
RHHIGLEEPKR

SEQ ID NO: 1006 - protein, 11 aa, Artificial
  IGFBP-2 heparin binding domain-containing peptide sequence
HHHIGLEEPKR

SEQ ID NO: 1007 - protein, 11 aa, Artificial
  IGFBP-2 heparin binding domain-containing peptide sequence
KKHIGLEEPKR

SEQ ID NO: 1008 - protein, 11 aa, Artificial
  IGFBP-2 heparin binding domain-containing peptide sequence
RKHIGLEEPKR

SEQ ID NO: 1009 - protein, 11 aa, Artificial
  IGFBP-2 heparin binding domain-containing peptide sequence
HKHIGLEEPKR

SEQ ID NO: 1010 - protein, 11 aa, Artificial
  IGFBP-2 heparin binding domain-containing peptide sequence
KRHIGLEEPKR

SEQ ID NO: 1011 - protein, 11 aa, Artificial
  IGFBP-2 heparin binding domain-containing peptide sequence
RRHIGLEEPKR

SEQ ID NO: 1012 - protein, 11 aa, Artificial
  IGFBP-2 heparin binding domain-containing peptide sequence
HRHIGLEEPKR

SEQ ID NO: 1013 - protein, 11 aa, Artificial
  IGFBP-2 heparin binding domain-containing peptide sequence
KHKIGLEEPKR

SEQ ID NO: 1014 - protein, 11 aa, Artificial
  IGFBP-2 heparin binding domain-containing peptide sequence
RHKIGLEEPKR

SEQ ID NO: 1015 - protein, 11 aa, Artificial
  IGFBP-2 heparin binding domain-containing peptide sequence
HHKIGLEEPKR

SEQ ID NO: 1016 - protein, 11 aa, Artificial
  IGFBP-2 heparin binding domain-containing peptide sequence
KKKIGLEEPKR

SEQ ID NO: 1017 - protein, 11 aa, Artificial
  IGFBP-2 heparin binding domain-containing peptide sequence
RKKIGLEEPKR

SEQ ID NO: 1018 - protein, 11 aa, Artificial
  IGFBP-2 heparin binding domain-containing peptide sequence
HKKIGLEEPKR

SEQ ID NO: 1019 - protein, 11 aa, Artificial
  IGFBP-2 heparin binding domain-containing peptide sequence
KRKIGLEEPKR

SEQ ID NO: 1020 - protein, 11 aa, Artificial
  IGFBP-2 heparin binding domain-containing peptide sequence
RRKIGLEEPKR

SEQ ID NO: 1021 - protein, 11 aa, Artificial
  IGFBP-2 heparin binding domain-containing peptide sequence
HRKIGLEEPKR

SEQ ID NO: 1022 - protein, 11 aa, Artificial
  IGFBP-2 heparin binding domain-containing peptide sequence
KHRIGLEEPKR

SEQ ID NO: 1023 - protein, 11 aa, Artificial
  IGFBP-2 heparin binding domain-containing peptide sequence
RHRIGLEEPKR

SEQ ID NO: 1024 - protein, 11 aa, Artificial
  IGFBP-2 heparin binding domain-containing peptide sequence
HHRIGLEEPKR

SEQ ID NO: 1025 - protein, 11 aa, Artificial
  IGFBP-2 heparin binding domain-containing peptide sequence
KKRIGLEEPKR

SEQ ID NO: 1026 - protein, 11 aa, Artificial
  IGFBP-2 heparin binding domain-containing peptide sequence
RKRIGLEEPKR

SEQ ID NO: 1027 - protein, 11 aa, Artificial
  IGFBP-2 heparin binding domain-containing peptide sequence
HKRIGLEEPKR

SEQ ID NO: 1028 - protein, 11 aa, Artificial
  IGFBP-2 heparin binding domain-containing peptide sequence
KRRIGLEEPKR

SEQ ID NO: 1029 - protein, 11 aa, Artificial
  IGFBP-2 heparin binding domain-containing peptide sequence
RRRIGLEEPKR

SEQ ID NO: 1030 - protein, 11 aa, Artificial
  IGFBP-2 heparin binding domain-containing peptide sequence
HRRIGLEEPKR

SEQ ID NO: 1031 - protein, 11 aa, Artificial
  IGFBP-2 heparin binding domain-containing peptide sequence
KHHVGLEEPKR

SEQ ID NO: 1032 - protein, 11 aa, Artificial
  IGFBP-2 heparin binding domain-containing peptide sequence
RHHVGLEEPKR

SEQ ID NO: 1033 - protein, 11 aa, Artificial
  IGFBP-2 heparin binding domain-containing peptide sequence
HHHVGLEEPKR

SEQ ID NO: 1034 - protein, 11 aa, Artificial
  IGFBP-2 heparin binding domain-containing peptide sequence
KKHVGLEEPKR

SEQ ID NO: 1035 - protein, 11 aa, Artificial
  IGFBP-2 heparin binding domain-containing peptide sequence
RKHVGLEEPKR

SEQ ID NO: 1036 - protein, 11 aa, Artificial
  IGFBP-2 heparin binding domain-containing peptide sequence
HKHVGLEEPKR

SEQ ID NO: 1037 - protein, 11 aa, Artificial
  IGFBP-2 heparin binding domain-containing peptide sequence
KRHVGLEEPKR

SEQ ID NO: 1038 - protein, 11 aa, Artificial
  IGFBP-2 heparin binding domain-containing peptide sequence
RRHVGLEEPKR

SEQ ID NO: 1039 - protein, 11 aa, Artificial
  IGFBP-2 heparin binding domain-containing peptide sequence
HRHVGLEEPKR

SEQ ID NO: 1040 - protein, 11 aa, Artificial
  IGFBP-2 heparin binding domain-containing peptide sequence
KHKVGLEEPKR

SEQ ID NO: 1041 - protein, 11 aa, Artificial
  IGFBP-2 heparin binding domain-containing peptide sequence
RHKVGLEEPKR

SEQ ID NO: 1042 - protein, 11 aa, Artificial
  IGFBP-2 heparin binding domain-containing peptide sequence
HHKVGLEEPKR

SEQ ID NO: 1043 - protein, 11 aa, Artificial
  IGFBP-2 heparin binding domain-containing peptide sequence
KKKVGLEEPKR

SEQ ID NO: 1044 - protein, 11 aa, Artificial
  IGFBP-2 heparin binding domain-containing peptide sequence
RKKVGLEEPKR

SEQ ID NO: 1045 - protein, 11 aa, Artificial
  IGFBP-2 heparin binding domain-containing peptide sequence
HKKVGLEEPKR

SEQ ID NO: 1046 - protein, 11 aa, Artificial
  IGFBP-2 heparin binding domain-containing peptide sequence
KRKVGLEEPKR

SEQ ID NO: 1047 - protein, 11 aa, Artificial
  IGFBP-2 heparin binding domain-containing peptide sequence
RRKVGLEEPKR

SEQ ID NO: 1048 - protein, 11 aa, Artificial
  IGFBP-2 heparin binding domain-containing peptide sequence
HRKVGLEEPKR

SEQ ID NO: 1049 - protein, 11 aa, Artificial
  IGFBP-2 heparin binding domain-containing peptide sequence
KHRVGLEEPKR

SEQ ID NO: 1050 - protein, 11 aa, Artificial
  IGFBP-2 heparin binding domain-containing peptide sequence
RHRVGLEEPKR

SEQ ID NO: 1051 - protein, 11 aa, Artificial
  IGFBP-2 heparin binding domain-containing peptide sequence
HHRVGLEEPKR

SEQ ID NO: 1052 - protein, 11 aa, Artificial
  IGFBP-2 heparin binding domain-containing peptide sequence
KKRVGLEEPKR

SEQ ID NO: 1053 - protein, 11 aa, Artificial
  IGFBP-2 heparin binding domain-containing peptide sequence
RKRVGLEEPKR

SEQ ID NO: 1054 - protein, 11 aa, Artificial
  IGFBP-2 heparin binding domain-containing peptide sequence
HKRVGLEEPKR

SEQ ID NO: 1055 - protein, 11 aa, Artificial
  IGFBP-2 heparin binding domain-containing peptide sequence
KRRVGLEEPKR

SEQ ID NO: 1056 - protein, 11 aa, Artificial
  IGFBP-2 heparin binding domain-containing peptide sequence
RRRVGLEEPKR

SEQ ID NO: 1057 - protein, 11 aa, Artificial
  IGFBP-2 heparin binding domain-containing peptide sequence
HRRVGLEEPKR

SEQ ID NO: 1058 - protein, 11 aa, Artificial
  IGFBP-2 heparin binding domain-containing peptide sequence
KHHLGIEEPKR

SEQ ID NO: 1059 - protein, 11 aa, Artificial
  IGFBP-2 heparin binding domain-containing peptide sequence
RHHLGIEEPKR

SEQ ID NO: 1060 - protein, 11 aa, Artificial
  IGFBP-2 heparin binding domain-containing peptide sequence
HHHLGIEEPKR

SEQ ID NO: 1061 - protein, 11 aa, Artificial
  IGFBP-2 heparin binding domain-containing peptide sequence
KKHLGIEEPKR

SEQ ID NO: 1062 - protein, 11 aa, Artificial
  IGFBP-2 heparin binding domain-containing peptide sequence
RKHLGIEEPKR

SEQ ID NO: 1063 - protein, 11 aa, Artificial
  IGFBP-2 heparin binding domain-containing peptide sequence
HKHLGIEEPKR

SEQ ID NO: 1064 - protein, 11 aa, Artificial
  IGFBP-2 heparin binding domain-containing peptide sequence
KRHLGIEEPKR

SEQ ID NO: 1065 - protein, 11 aa, Artificial
  IGFBP-2 heparin binding domain-containing peptide sequence
RRHLGIEEPKR

SEQ ID NO: 1066 - protein, 11 aa, Artificial
  IGFBP-2 heparin binding domain-containing peptide sequence
HRHLGIEEPKR

SEQ ID NO: 1067 - protein, 11 aa, Artificial
  IGFBP-2 heparin binding domain-containing peptide sequence
KHKLGIEEPKR

SEQ ID NO: 1068 - protein, 11 aa, Artificial
  IGFBP-2 heparin binding domain-containing peptide sequence
RHKLGIEEPKR

SEQ ID NO: 1069 - protein, 11 aa, Artificial
  IGFBP-2 heparin binding domain-containing peptide sequence
HHKLGIEEPKR

SEQ ID NO: 1070 - protein, 11 aa, Artificial
  IGFBP-2 heparin binding domain-containing peptide sequence
KKKLGIEEPKR

SEQ ID NO: 1071 - protein, 11 aa, Artificial
  IGFBP-2 heparin binding domain-containing peptide sequence
RKKLGIEEPKR

SEQ ID NO: 1072 - protein, 11 aa, Artificial
  IGFBP-2 heparin binding domain-containing peptide sequence
HKKLGIEEPKR

SEQ ID NO: 1073 - protein, 11 aa, Artificial
  IGFBP-2 heparin binding domain-containing peptide sequence
KRKLGIEEPKR

SEQ ID NO: 1074 - protein, 11 aa, Artificial
  IGFBP-2 heparin binding domain-containing peptide sequence
RRKLGIEEPKR

SEQ ID NO: 1075 - protein, 11 aa, Artificial
  IGFBP-2 heparin binding domain-containing peptide sequence
HRKLGIEEPKR

SEQ ID NO: 1076 - protein, 11 aa, Artificial
  IGFBP-2 heparin binding domain-containing peptide sequence
KHRLGIEEPKR

SEQ ID NO: 1077 - protein, 11 aa, Artificial
  IGFBP-2 heparin binding domain-containing peptide sequence
RHRLGIEEPKR

SEQ ID NO: 1078 - protein, 11 aa, Artificial
  IGFBP-2 heparin binding domain-containing peptide sequence
HHRLGIEEPKR

SEQ ID NO: 1079 - protein, 11 aa, Artificial
  IGFBP-2 heparin binding domain-containing peptide sequence
KKRLGIEEPKR

SEQ ID NO: 1080 - protein, 11 aa, Artificial
  IGFBP-2 heparin binding domain-containing peptide sequence
RKRLGIEEPKR

SEQ ID NO: 1081 - protein, 11 aa, Artificial
  IGFBP-2 heparin binding domain-containing peptide sequence
HKRLGIEEPKR

SEQ ID NO: 1082 - protein, 11 aa, Artificial
  IGFBP-2 heparin binding domain-containing peptide sequence
KRRLGIEEPKR

SEQ ID NO: 1083 - protein, 11 aa, Artificial
  IGFBP-2 heparin binding domain-containing peptide sequence
RRRLGIEEPKR

SEQ ID NO: 1084 - protein, 11 aa, Artificial
  IGFBP-2 heparin binding domain-containing peptide sequence
HRRLGIEEPKR

SEQ ID NO: 1085 - protein, 11 aa, Artificial
  IGFBP-2 heparin binding domain-containing peptide sequence
KHHIGIEEPKR

SEQ ID NO: 1086 - protein, 11 aa, Artificial
  IGFBP-2 heparin binding domain-containing peptide sequence
RHHIGIEEPKR

SEQ ID NO: 1087 - protein, 11 aa, Artificial
  IGFBP-2 heparin binding domain-containing peptide sequence
HHHIGIEEPKR

SEQ ID NO: 1088 - protein, 11 aa, Artificial
  IGFBP-2 heparin binding domain-containing peptide sequence
KKHIGIEEPKR

SEQ ID NO: 1089 - protein, 11 aa, Artificial
  IGFBP-2 heparin binding domain-containing peptide sequence
RKHIGIEEPKR

SEQ ID NO: 1090 - protein, 11 aa, Artificial
  IGFBP-2 heparin binding domain-containing peptide sequence
HKHIGIEEPKR

SEQ ID NO: 1091 - protein, 11 aa, Artificial
  IGFBP-2 heparin binding domain-containing peptide sequence
KRHIGIEEPKR

SEQ ID NO: 1092 - protein, 11 aa, Artificial
  IGFBP-2 heparin binding domain-containing peptide sequence
RRHIGIEEPKR

SEQ ID NO: 1093 - protein, 11 aa, Artificial
  IGFBP-2 heparin binding domain-containing peptide sequence
HRHIGIEEPKR

SEQ ID NO: 1094 - protein, 11 aa, Artificial
  IGFBP-2 heparin binding domain-containing peptide sequence
KHKIGIEEPKR

SEQ ID NO: 1095 - protein, 11 aa, Artificial
  IGFBP-2 heparin binding domain-containing peptide sequence
RHKIGIEEPKR

SEQ ID NO: 1096 - protein, 11 aa, Artificial
  IGFBP-2 heparin binding domain-containing peptide sequence
HHKIGIEEPKR

SEQ ID NO: 1097 - protein, 11 aa, Artificial
  IGFBP-2 heparin binding domain-containing peptide sequence
KKKIGIEEPKR

SEQ ID NO: 1098 - protein, 11 aa, Artificial
  IGFBP-2 heparin binding domain-containing peptide sequence
RKKIGIEEPKR

SEQ ID NO: 1099 - protein, 11 aa, Artificial
  IGFBP-2 heparin binding domain-containing peptide sequence
HKKIGIEEPKR

SEQ ID NO: 1100 - protein, 11 aa, Artificial
  IGFBP-2 heparin binding domain-containing peptide sequence
KRKIGIEEPKR

SEQ ID NO: 1101 - protein, 11 aa, Artificial
  IGFBP-2 heparin binding domain-containing peptide sequence
RRKIGIEEPKR

SEQ ID NO: 1102 - protein, 11 aa, Artificial
  IGFBP-2 heparin binding domain-containing peptide sequence
HRKIGIEEPKR

SEQ ID NO: 1103 - protein, 11 aa, Artificial
  IGFBP-2 heparin binding domain-containing peptide sequence
KHRIGIEEPKR

SEQ ID NO: 1104 - protein, 11 aa, Artificial
  IGFBP-2 heparin binding domain-containing peptide sequence
RHRIGIEEPKR

SEQ ID NO: 1105 - protein, 11 aa, Artificial
  IGFBP-2 heparin binding domain-containing peptide sequence
HHRIGIEEPKR

SEQ ID NO: 1106 - protein, 11 aa, Artificial
  IGFBP-2 heparin binding domain-containing peptide sequence
KKRIGIEEPKR

SEQ ID NO: 1107 - protein, 11 aa, Artificial
  IGFBP-2 heparin binding domain-containing peptide sequence
RKRIGIEEPKR

SEQ ID NO: 1108 - protein, 11 aa, Artificial
  IGFBP-2 heparin binding domain-containing peptide sequence
HKRIGIEEPKR

SEQ ID NO: 1109 - protein, 11 aa, Artificial
  IGFBP-2 heparin binding domain-containing peptide sequence
KRRIGIEEPKR

SEQ ID NO: 1110 - protein, 11 aa, Artificial
  IGFBP-2 heparin binding domain-containing peptide sequence
RRRIGIEEPKR

SEQ ID NO: 1111 - protein, 11 aa, Artificial
  IGFBP-2 heparin binding domain-containing peptide sequence
HRRIGIEEPKR

SEQ ID NO: 1112 - protein, 11 aa, Artificial
  IGFBP-2 heparin binding domain-containing peptide sequence
KHHVGIEEPKR

SEQ ID NO: 1113 - protein, 11 aa, Artificial
  IGFBP-2 heparin binding domain-containing peptide sequence
RHHVGIEEPKR

SEQ ID NO: 1114 - protein, 11 aa, Artificial
  IGFBP-2 heparin binding domain-containing peptide sequence
HHHVGIEEPKR

SEQ ID NO: 1115 - protein, 11 aa, Artificial
  IGFBP-2 heparin binding domain-containing peptide sequence
KKHVGIEEPKR

SEQ ID NO: 1116 - protein, 11 aa, Artificial
  IGFBP-2 heparin binding domain-containing peptide sequence
RKHVGIEEPKR

SEQ ID NO: 1117 - protein, 11 aa, Artificial
  IGFBP-2 heparin binding domain-containing peptide sequence
HKHVGIEEPKR

SEQ ID NO: 1118 - protein, 11 aa, Artificial
  IGFBP-2 heparin binding domain-containing peptide sequence
KRHVGIEEPKR

SEQ ID NO: 1119 - protein, 11 aa, Artificial
  IGFBP-2 heparin binding domain-containing peptide sequence
RRHVGIEEPKR

SEQ ID NO: 1120 - protein, 11 aa, Artificial
  IGFBP-2 heparin binding domain-containing peptide sequence
HRHVGIEEPKR

SEQ ID NO: 1121 - protein, 11 aa, Artificial
  IGFBP-2 heparin binding domain-containing peptide sequence
KHKVGIEEPKR

SEQ ID NO: 1122 - protein, 11 aa, Artificial
  IGFBP-2 heparin binding domain-containing peptide sequence
RHKVGIEEPKR

SEQ ID NO: 1123 - protein, 11 aa, Artificial
  IGFBP-2 heparin binding domain-containing peptide sequence
HHKVGIEEPKR

SEQ ID NO: 1124 - protein, 11 aa, Artificial
  IGFBP-2 heparin binding domain-containing peptide sequence
KKKVGIEEPKR

SEQ ID NO: 1125 - protein, 11 aa, Artificial
  IGFBP-2 heparin binding domain-containing peptide sequence
RKKVGIEEPKR

SEQ ID NO: 1126 - protein, 11 aa, Artificial
  IGFBP-2 heparin binding domain-containing peptide sequence
HKKVGIEEPKR

SEQ ID NO: 1127 - protein, 11 aa, Artificial
  IGFBP-2 heparin binding domain-containing peptide sequence
KRKVGIEEPKR

SEQ ID NO: 1128 - protein, 11 aa, Artificial
  IGFBP-2 heparin binding domain-containing peptide sequence
RRKVGIEEPKR

SEQ ID NO: 1129 - protein, 11 aa, Artificial
  IGFBP-2 heparin binding domain-containing peptide sequence
HRKVGIEEPKR

SEQ ID NO: 1130 - protein, 11 aa, Artificial
  IGFBP-2 heparin binding domain-containing peptide sequence
KHRVGIEEPKR

SEQ ID NO: 1131 - protein, 11 aa, Artificial
  IGFBP-2 heparin binding domain-containing peptide sequence
RHRVGIEEPKR

SEQ ID NO: 1132 - protein, 11 aa, Artificial
  IGFBP-2 heparin binding domain-containing peptide sequence
HHRVGIEEPKR

SEQ ID NO: 1133 - protein, 11 aa, Artificial
  IGFBP-2 heparin binding domain-containing peptide sequence
KKRVGIEEPKR

SEQ ID NO: 1134 - protein, 11 aa, Artificial
  IGFBP-2 heparin binding domain-containing peptide sequence
RKRVGIEEPKR

SEQ ID NO: 1135 - protein, 11 aa, Artificial
  IGFBP-2 heparin binding domain-containing peptide sequence
HKRVGIEEPKR

SEQ ID NO: 1136 - protein, 11 aa, Artificial
  IGFBP-2 heparin binding domain-containing peptide sequence
KRRVGIEEPKR

SEQ ID NO: 1137 - protein, 11 aa, Artificial
  IGFBP-2 heparin binding domain-containing peptide sequence
RRRVGIEEPKR

SEQ ID NO: 1138 - protein, 11 aa, Artificial
  IGFBP-2 heparin binding domain-containing peptide sequence
HRRVGIEEPKR

SEQ ID NO: 1139 - protein, 11 aa, Artificial
  IGFBP-2 heparin binding domain-containing peptide sequence
KHHLGVEEPKR

SEQ ID NO: 1140 - protein, 11 aa, Artificial
  IGFBP-2 heparin binding domain-containing peptide sequence
RHHLGVEEPKR

SEQ ID NO: 1141 - protein, 11 aa, Artificial
  IGFBP-2 heparin binding domain-containing peptide sequence
HHHLGVEEPKR

SEQ ID NO: 1142 - protein, 11 aa, Artificial
  IGFBP-2 heparin binding domain-containing peptide sequence
KKHLGVEEPKR

SEQ ID NO: 1143 - protein, 11 aa, Artificial
  IGFBP-2 heparin binding domain-containing peptide sequence
RKHLGVEEPKR

SEQ ID NO: 1144 - protein, 11 aa, Artificial
  IGFBP-2 heparin binding domain-containing peptide sequence
HKHLGVEEPKR

SEQ ID NO: 1145 - protein, 11 aa, Artificial
  IGFBP-2 heparin binding domain-containing peptide sequence
KRHLGVEEPKR

SEQ ID NO: 1146 - protein, 11 aa, Artificial
  IGFBP-2 heparin binding domain-containing peptide sequence
RRHLGVEEPKR

SEQ ID NO: 1147 - protein, 11 aa, Artificial
  IGFBP-2 heparin binding domain-containing peptide sequence
HRHLGVEEPKR

SEQ ID NO: 1148 - protein, 11 aa, Artificial
  IGFBP-2 heparin binding domain-containing peptide sequence
KHKLGVEEPKR

SEQ ID NO: 1149 - protein, 11 aa, Artificial
  IGFBP-2 heparin binding domain-containing peptide sequence
RHKLGVEEPKR

SEQ ID NO: 1150 - protein, 11 aa, Artificial
  IGFBP-2 heparin binding domain-containing peptide sequence
HHKLGVEEPKR

SEQ ID NO: 1151 - protein, 11 aa, Artificial
  IGFBP-2 heparin binding domain-containing peptide sequence
KKKLGVEEPKR

SEQ ID NO: 1152 - protein, 11 aa, Artificial
  IGFBP-2 heparin binding domain-containing peptide sequence
RKKLGVEEPKR

SEQ ID NO: 1153 - protein, 11 aa, Artificial
  IGFBP-2 heparin binding domain-containing peptide sequence
HKKLGVEEPKR

SEQ ID NO: 1154 - protein, 11 aa, Artificial
  IGFBP-2 heparin binding domain-containing peptide sequence
KRKLGVEEPKR

SEQ ID NO: 1155 - protein, 11 aa, Artificial
  IGFBP-2 heparin binding domain-containing peptide sequence
RRKLGVEEPKR

SEQ ID NO: 1156 - protein, 11 aa, Artificial
  IGFBP-2 heparin binding domain-containing peptide sequence
HRKLGVEEPKR

SEQ ID NO: 1157 - protein, 11 aa, Artificial
  IGFBP-2 heparin binding domain-containing peptide sequence
KHRLGVEEPKR

SEQ ID NO: 1158 - protein, 11 aa, Artificial
  IGFBP-2 heparin binding domain-containing peptide sequence
RHRLGVEEPKR

SEQ ID NO: 1159 - protein, 11 aa, Artificial
  IGFBP-2 heparin binding domain-containing peptide sequence
HHRLGVEEPKR

SEQ ID NO: 1160 - protein, 11 aa, Artificial
  IGFBP-2 heparin binding domain-containing peptide sequence
KKRLGVEEPKR

SEQ ID NO: 1161 - protein, 11 aa, Artificial
  IGFBP-2 heparin binding domain-containing peptide sequence
RKRLGVEEPKR

SEQ ID NO: 1162 - protein, 11 aa, Artificial
  IGFBP-2 heparin binding domain-containing peptide sequence
HKRLGVEEPKR

SEQ ID NO: 1163 - protein, 11 aa, Artificial
  IGFBP-2 heparin binding domain-containing peptide sequence
KRRLGVEEPKR

SEQ ID NO: 1164 - protein, 11 aa, Artificial
  IGFBP-2 heparin binding domain-containing peptide sequence
RRRLGVEEPKR

SEQ ID NO: 1165 - protein, 11 aa, Artificial
  IGFBP-2 heparin binding domain-containing peptide sequence
HRRLGVEEPKR

SEQ ID NO: 1166 - protein, 11 aa, Artificial
  IGFBP-2 heparin binding domain-containing peptide sequence
KHHIGVEEPKR

SEQ ID NO: 1167 - protein, 11 aa, Artificial
  IGFBP-2 heparin binding domain-containing peptide sequence
RHHIGVEEPKR

SEQ ID NO: 1168 - protein, 11 aa, Artificial
  IGFBP-2 heparin binding domain-containing peptide sequence
HHHIGVEEPKR

SEQ ID NO: 1169 - protein, 11 aa, Artificial
  IGFBP-2 heparin binding domain-containing peptide sequence
KKHIGVEEPKR

SEQ ID NO: 1170 - protein, 11 aa, Artificial
  IGFBP-2 heparin binding domain-containing peptide sequence
RKHIGVEEPKR

SEQ ID NO: 1171 - protein, 11 aa, Artificial
  IGFBP-2 heparin binding domain-containing peptide sequence
HKHIGVEEPKR

SEQ ID NO: 1172 - protein, 11 aa, Artificial
  IGFBP-2 heparin binding domain-containing peptide sequence
KRHIGVEEPKR

SEQ ID NO: 1173 - protein, 11 aa, Artificial
  IGFBP-2 heparin binding domain-containing peptide sequence
RRHIGVEEPKR

SEQ ID NO: 1174 - protein, 11 aa, Artificial
  IGFBP-2 heparin binding domain-containing peptide sequence
HRHIGVEEPKR

SEQ ID NO: 1175 - protein, 11 aa, Artificial
  IGFBP-2 heparin binding domain-containing peptide sequence
KHKIGVEEPKR

SEQ ID NO: 1176 - protein, 11 aa, Artificial
  IGFBP-2 heparin binding domain-containing peptide sequence
RHKIGVEEPKR

SEQ ID NO: 1177 - protein, 11 aa, Artificial
  IGFBP-2 heparin binding domain-containing peptide sequence
HHKIGVEEPKR

SEQ ID NO: 1178 - protein, 11 aa, Artificial
  IGFBP-2 heparin binding domain-containing peptide sequence
KKKIGVEEPKR

SEQ ID NO: 1179 - protein, 11 aa, Artificial
  IGFBP-2 heparin binding domain-containing peptide sequence
RKKIGVEEPKR

SEQ ID NO: 1180 - protein, 11 aa, Artificial
  IGFBP-2 heparin binding domain-containing peptide sequence
HKKIGVEEPKR

SEQ ID NO: 1181 - protein, 11 aa, Artificial
  IGFBP-2 heparin binding domain-containing peptide sequence
KRKIGVEEPKR

SEQ ID NO: 1182 - protein, 11 aa, Artificial
  IGFBP-2 heparin binding domain-containing peptide sequence
RRKIGVEEPKR

SEQ ID NO: 1183 - protein, 11 aa, Artificial
  IGFBP-2 heparin binding domain-containing peptide sequence
HRKIGVEEPKR

SEQ ID NO: 1184 - protein, 11 aa, Artificial
  IGFBP-2 heparin binding domain-containing peptide sequence
KHRIGVEEPKR

SEQ ID NO: 1185 - protein, 11 aa, Artificial
  IGFBP-2 heparin binding domain-containing peptide sequence
RHRIGVEEPKR

SEQ ID NO: 1186 - protein, 11 aa, Artificial
  IGFBP-2 heparin binding domain-containing peptide sequence
HHRIGVEEPKR

SEQ ID NO: 1187 - protein, 11 aa, Artificial
  IGFBP-2 heparin binding domain-containing peptide sequence
KKRIGVEEPKR

SEQ ID NO: 1188 - protein, 11 aa, Artificial
  IGFBP-2 heparin binding domain-containing peptide sequence
RKRIGVEEPKR

SEQ ID NO: 1189 - protein, 11 aa, Artificial
  IGFBP-2 heparin binding domain-containing peptide sequence
HKRIGVEEPKR

SEQ ID NO: 1190 - protein, 11 aa, Artificial
  IGFBP-2 heparin binding domain-containing peptide sequence
KRRIGVEEPKR

SEQ ID NO: 1191 - protein, 11 aa, Artificial
  IGFBP-2 heparin binding domain-containing peptide sequence
RRRIGVEEPKR

SEQ ID NO: 1192 - protein, 11 aa, Artificial
  IGFBP-2 heparin binding domain-containing peptide sequence
HRRIGVEEPKR

SEQ ID NO: 1193 - protein, 11 aa, Artificial
  IGFBP-2 heparin binding domain-containing peptide sequence
KHHVGVEEPKR

SEQ ID NO: 1194 - protein, 11 aa, Artificial
  IGFBP-2 heparin binding domain-containing peptide sequence
RHHVGVEEPKR

SEQ ID NO: 1195 - protein, 11 aa, Artificial
  IGFBP-2 heparin binding domain-containing peptide sequence
HHHVGVEEPKR

SEQ ID NO: 1196 - protein, 11 aa, Artificial
  IGFBP-2 heparin binding domain-containing peptide sequence
KKHVGVEEPKR

SEQ ID NO: 1197 - protein, 11 aa, Artificial
  IGFBP-2 heparin binding domain-containing peptide sequence
RKHVGVEEPKR

SEQ ID NO: 1198 - protein, 11 aa, Artificial
  IGFBP-2 heparin binding domain-containing peptide sequence
HKHVGVEEPKR

SEQ ID NO: 1199 - protein, 11 aa, Artificial
  IGFBP-2 heparin binding domain-containing peptide sequence
KRHVGVEEPKR

SEQ ID NO: 1200 - protein, 11 aa, Artificial
  IGFBP-2 heparin binding domain-containing peptide sequence
RRHVGVEEPKR

SEQ ID NO: 1201 - protein, 11 aa, Artificial
  IGFBP-2 heparin binding domain-containing peptide sequence
HRHVGVEEPKR

SEQ ID NO: 1202 - protein, 11 aa, Artificial
  IGFBP-2 heparin binding domain-containing peptide sequence
KHKVGVEEPKR

SEQ ID NO: 1203 - protein, 11 aa, Artificial
  IGFBP-2 heparin binding domain-containing peptide sequence
RHKVGVEEPKR

SEQ ID NO: 1204 - protein, 11 aa, Artificial
  IGFBP-2 heparin binding domain-containing peptide sequence
HHKVGVEEPKR

SEQ ID NO: 1205 - protein, 11 aa, Artificial
  IGFBP-2 heparin binding domain-containing peptide sequence
KKKVGVEEPKR

SEQ ID NO: 1206 - protein, 11 aa, Artificial
  IGFBP-2 heparin binding domain-containing peptide sequence
RKKVGVEEPKR

SEQ ID NO: 1207 - protein, 11 aa, Artificial
  IGFBP-2 heparin binding domain-containing peptide sequence
HKKVGVEEPKR

SEQ ID NO: 1208 - protein, 11 aa, Artificial
  IGFBP-2 heparin binding domain-containing peptide sequence
KRKVGVEEPKR

SEQ ID NO: 1209 - protein, 11 aa, Artificial
  IGFBP-2 heparin binding domain-containing peptide sequence
RRKVGVEEPKR

SEQ ID NO: 1210 - protein, 11 aa, Artificial
  IGFBP-2 heparin binding domain-containing peptide sequence
HRKVGVEEPKR

SEQ ID NO: 1211 - protein, 11 aa, Artificial
  IGFBP-2 heparin binding domain-containing peptide sequence
KHRVGVEEPKR

SEQ ID NO: 1212 - protein, 11 aa, Artificial
  IGFBP-2 heparin binding domain-containing peptide sequence
RHRVGVEEPKR

SEQ ID NO: 1213 - protein, 11 aa, Artificial
  IGFBP-2 heparin binding domain-containing peptide sequence
HHRVGVEEPKR

SEQ ID NO: 1214 - protein, 11 aa, Artificial
  IGFBP-2 heparin binding domain-containing peptide sequence
KKRVGVEEPKR

SEQ ID NO: 1215 - protein, 11 aa, Artificial
  IGFBP-2 heparin binding domain-containing peptide sequence
RKRVGVEEPKR

SEQ ID NO: 1216 - protein, 11 aa, Artificial
  IGFBP-2 heparin binding domain-containing peptide sequence
HKRVGVEEPKR

SEQ ID NO: 1217 - protein, 11 aa, Artificial
  IGFBP-2 heparin binding domain-containing peptide sequence
KRRVGVEEPKR

SEQ ID NO: 1218 - protein, 11 aa, Artificial
  IGFBP-2 heparin binding domain-containing peptide sequence
RRRVGVEEPKR

SEQ ID NO: 1219 - protein, 11 aa, Artificial
  IGFBP-2 heparin binding domain-containing peptide sequence
HRRVGVEEPKR

SEQ ID NO: 1220 - protein, 11 aa, Artificial
  IGFBP-2 heparin binding domain-containing peptide sequence
KHHLGLNEPKR

SEQ ID NO: 1221 - protein, 11 aa, Artificial
  IGFBP-2 heparin binding domain-containing peptide sequence
RHHLGLNEPKR

SEQ ID NO: 1222 - protein, 11 aa, Artificial
  IGFBP-2 heparin binding domain-containing peptide sequence
HHHLGLNEPKR

SEQ ID NO: 1223 - protein, 11 aa, Artificial
  IGFBP-2 heparin binding domain-containing peptide sequence
KKHLGLNEPKR

SEQ ID NO: 1224 - protein, 11 aa, Artificial
  IGFBP-2 heparin binding domain-containing peptide sequence
RKHLGLNEPKR

SEQ ID NO: 1225 - protein, 11 aa, Artificial
  IGFBP-2 heparin binding domain-containing peptide sequence
HKHLGLNEPKR

SEQ ID NO: 1226 - protein, 11 aa, Artificial
  IGFBP-2 heparin binding domain-containing peptide sequence
KRHLGLNEPKR

SEQ ID NO: 1227 - protein, 11 aa, Artificial
  IGFBP-2 heparin binding domain-containing peptide sequence
RRHLGLNEPKR

SEQ ID NO: 1228 - protein, 11 aa, Artificial
  IGFBP-2 heparin binding domain-containing peptide sequence
HRHLGLNEPKR

SEQ ID NO: 1229 - protein, 11 aa, Artificial
  IGFBP-2 heparin binding domain-containing peptide sequence
KHKLGLNEPKR

SEQ ID NO: 1230 - protein, 11 aa, Artificial
  IGFBP-2 heparin binding domain-containing peptide sequence
RHKLGLNEPKR

SEQ ID NO: 1231 - protein, 11 aa, Artificial
  IGFBP-2 heparin binding domain-containing peptide sequence
HHKLGLNEPKR

SEQ ID NO: 1232 - protein, 11 aa, Artificial
  IGFBP-2 heparin binding domain-containing peptide sequence
KKKLGLNEPKR

SEQ ID NO: 1233 - protein, 11 aa, Artificial
  IGFBP-2 heparin binding domain-containing peptide sequence
RKKLGLNEPKR

SEQ ID NO: 1234 - protein, 11 aa, Artificial
  IGFBP-2 heparin binding domain-containing peptide sequence
HKKLGLNEPKR

SEQ ID NO: 1235 - protein, 11 aa, Artificial
  IGFBP-2 heparin binding domain-containing peptide sequence
KRKLGLNEPKR

SEQ ID NO: 1236 - protein, 11 aa, Artificial
  IGFBP-2 heparin binding domain-containing peptide sequence
RRKLGLNEPKR

SEQ ID NO: 1237 - protein, 11 aa, Artificial
  IGFBP-2 heparin binding domain-containing peptide sequence
HRKLGLNEPKR

SEQ ID NO: 1238 - protein, 11 aa, Artificial
  IGFBP-2 heparin binding domain-containing peptide sequence
KHRLGLNEPKR

SEQ ID NO: 1239 - protein, 11 aa, Artificial
  IGFBP-2 heparin binding domain-containing peptide sequence
RHRLGLNEPKR

SEQ ID NO: 1240 - protein, 11 aa, Artificial
  IGFBP-2 heparin binding domain-containing peptide sequence
HHRLGLNEPKR

SEQ ID NO: 1241 - protein, 11 aa, Artificial
  IGFBP-2 heparin binding domain-containing peptide sequence
KKRLGLNEPKR

SEQ ID NO: 1242 - protein, 11 aa, Artificial
  IGFBP-2 heparin binding domain-containing peptide sequence
RKRLGLNEPKR

SEQ ID NO: 1243 - protein, 11 aa, Artificial
  IGFBP-2 heparin binding domain-containing peptide sequence
HKRLGLNEPKR

SEQ ID NO: 1244 - protein, 11 aa, Artificial
  IGFBP-2 heparin binding domain-containing peptide sequence
KRRLGLNEPKR

SEQ ID NO: 1245 - protein, 11 aa, Artificial
  IGFBP-2 heparin binding domain-containing peptide sequence
RRRLGLNEPKR

SEQ ID NO: 1246 - protein, 11 aa, Artificial
  IGFBP-2 heparin binding domain-containing peptide sequence
HRRLGLNEPKR

SEQ ID NO: 1247 - protein, 10 aa, Artificial
  IGFBP-2 heparin binding domain-containing peptide sequence
KHHIGLNPKR

SEQ ID NO: 1248 - protein, 11 aa, Artificial
  IGFBP-2 heparin binding domain-containing peptide sequence
RHHIGLNEPKR

SEQ ID NO: 1249 - protein, 11 aa, Artificial
  IGFBP-2 heparin binding domain-containing peptide sequence
HHHIGLNEPKR

SEQ ID NO: 1250 - protein, 11 aa, Artificial
  IGFBP-2 heparin binding domain-containing peptide sequence
KKHIGLNEPKR

SEQ ID NO: 1251 - protein, 11 aa, Artificial
  IGFBP-2 heparin binding domain-containing peptide sequence
RKHIGLNEPKR

SEQ ID NO: 1252 - protein, 11 aa, Artificial
  IGFBP-2 heparin binding domain-containing peptide sequence
HKHIGLNEPKR

SEQ ID NO: 1253 - protein, 11 aa, Artificial
  IGFBP-2 heparin binding domain-containing peptide sequence
KRHIGLNEPKR

SEQ ID NO: 1254 - protein, 11 aa, Artificial
  IGFBP-2 heparin binding domain-containing peptide sequence
RRHIGLNEPKR

SEQ ID NO: 1255 - protein, 11 aa, Artificial
  IGFBP-2 heparin binding domain-containing peptide sequence
HRHIGLNEPKR

SEQ ID NO: 1256 - protein, 11 aa, Artificial
  IGFBP-2 heparin binding domain-containing peptide sequence
KHKIGLNEPKR

SEQ ID NO: 1257 - protein, 11 aa, Artificial
  IGFBP-2 heparin binding domain-containing peptide sequence
RHKIGLNEPKR

SEQ ID NO: 1258 - protein, 11 aa, Artificial
  IGFBP-2 heparin binding domain-containing peptide sequence
HHKIGLNEPKR

SEQ ID NO: 1259 - protein, 11 aa, Artificial
  IGFBP-2 heparin binding domain-containing peptide sequence
KKKIGLNEPKR

SEQ ID NO: 1260 - protein, 11 aa, Artificial
  IGFBP-2 heparin binding domain-containing peptide sequence
RKKIGLNEPKR

SEQ ID NO: 1261 - protein, 11 aa, Artificial
  IGFBP-2 heparin binding domain-containing peptide sequence
HKKIGLNEPKR

SEQ ID NO: 1262 - protein, 11 aa, Artificial
  IGFBP-2 heparin binding domain-containing peptide sequence
KRKIGLNEPKR

SEQ ID NO: 1263 - protein, 11 aa, Artificial
  IGFBP-2 heparin binding domain-containing peptide sequence
RRKIGLNEPKR

SEQ ID NO: 1264 - protein, 11 aa, Artificial
  IGFBP-2 heparin binding domain-containing peptide sequence
HRKIGLNEPKR

SEQ ID NO: 1265 - protein, 11 aa, Artificial
  IGFBP-2 heparin binding domain-containing peptide sequence
KHRIGLNEPKR

SEQ ID NO: 1266 - protein, 11 aa, Artificial
  IGFBP-2 heparin binding domain-containing peptide sequence
RHRIGLNEPKR

SEQ ID NO: 1267 - protein, 11 aa, Artificial
  IGFBP-2 heparin binding domain-containing peptide sequence
HHRIGLNEPKR

SEQ ID NO: 1268 - protein, 11 aa, Artificial
  IGFBP-2 heparin binding domain-containing peptide sequence
KKRIGLNEPKR

SEQ ID NO: 1269 - protein, 11 aa, Artificial
  IGFBP-2 heparin binding domain-containing peptide sequence
RKRIGLNEPKR

SEQ ID NO: 1270 - protein, 11 aa, Artificial
  IGFBP-2 heparin binding domain-containing peptide sequence
HKRIGLNEPKR

SEQ ID NO: 1271 - protein, 11 aa, Artificial
  IGFBP-2 heparin binding domain-containing peptide sequence
KRRIGLNEPKR

SEQ ID NO: 1272 - protein, 11 aa, Artificial
  IGFBP-2 heparin binding domain-containing peptide sequence
RRRIGLNEPKR

SEQ ID NO: 1273 - protein, 11 aa, Artificial
  IGFBP-2 heparin binding domain-containing peptide sequence
HRRIGLNEPKR

SEQ ID NO: 1274 - protein, 11 aa, Artificial
  IGFBP-2 heparin binding domain-containing peptide sequence
KHHVGLNEPKR

SEQ ID NO: 1275 - protein, 11 aa, Artificial
  IGFBP-2 heparin binding domain-containing peptide sequence
RHHVGLNEPKR

SEQ ID NO: 1276 - protein, 11 aa, Artificial
  IGFBP-2 heparin binding domain-containing peptide sequence
HHHVGLNEPKR

SEQ ID NO: 1277 - protein, 11 aa, Artificial
  IGFBP-2 heparin binding domain-containing peptide sequence
KKHVGLNEPKR

SEQ ID NO: 1278 - protein, 11 aa, Artificial
  IGFBP-2 heparin binding domain-containing peptide sequence
RKHVGLNEPKR

SEQ ID NO: 1279 - protein, 11 aa, Artificial
  IGFBP-2 heparin binding domain-containing peptide sequence
HKHVGLNEPKR

SEQ ID NO: 1280 - protein, 11 aa, Artificial
  IGFBP-2 heparin binding domain-containing peptide sequence
KRHVGLNEPKR

SEQ ID NO: 1281 - protein, 11 aa, Artificial
  IGFBP-2 heparin binding domain-containing peptide sequence
RRHVGLNEPKR

SEQ ID NO: 1282 - protein, 11 aa, Artificial
  IGFBP-2 heparin binding domain-containing peptide sequence
HRHVGLNEPKR

SEQ ID NO: 1283 - protein, 11 aa, Artificial
  IGFBP-2 heparin binding domain-containing peptide sequence
KHKVGLNEPKR

SEQ ID NO: 1284 - protein, 11 aa, Artificial
  IGFBP-2 heparin binding domain-containing peptide sequence
RHKVGLNEPKR

SEQ ID NO: 1285 - protein, 11 aa, Artificial
  IGFBP-2 heparin binding domain-containing peptide sequence
HHKVGLNEPKR

SEQ ID NO: 1286 - protein, 11 aa, Artificial
  IGFBP-2 heparin binding domain-containing peptide sequence
KKKVGLNEPKR

SEQ ID NO: 1287 - protein, 11 aa, Artificial
  IGFBP-2 heparin binding domain-containing peptide sequence
RKKVGLNEPKR

SEQ ID NO: 1288 - protein, 11 aa, Artificial
  IGFBP-2 heparin binding domain-containing peptide sequence
HKKVGLNEPKR

SEQ ID NO: 1289 - protein, 11 aa, Artificial
  IGFBP-2 heparin binding domain-containing peptide sequence
KRKVGLNEPKR

SEQ ID NO: 1290 - protein, 11 aa, Artificial
  IGFBP-2 heparin binding domain-containing peptide sequence
RRKVGLNEPKR

SEQ ID NO: 1291 - protein, 11 aa, Artificial
  IGFBP-2 heparin binding domain-containing peptide sequence
HRKVGLNEPKR

SEQ ID NO: 1292 - protein, 11 aa, Artificial
  IGFBP-2 heparin binding domain-containing peptide sequence
KHRVGLNEPKR

SEQ ID NO: 1293 - protein, 11 aa, Artificial
  IGFBP-2 heparin binding domain-containing peptide sequence
RHRVGLNEPKR

SEQ ID NO: 1294 - protein, 11 aa, Artificial
  IGFBP-2 heparin binding domain-containing peptide sequence
HHRVGLNEPKR

SEQ ID NO: 1295 - protein, 11 aa, Artificial
  IGFBP-2 heparin binding domain-containing peptide sequence
KKRVGLNEPKR

SEQ ID NO: 1296 - protein, 11 aa, Artificial
  IGFBP-2 heparin binding domain-containing peptide sequence
RKRVGLNEPKR

SEQ ID NO: 1297 - protein, 11 aa, Artificial
  IGFBP-2 heparin binding domain-containing peptide sequence
HKRVGLNEPKR

SEQ ID NO: 1298 - protein, 11 aa, Artificial
  IGFBP-2 heparin binding domain-containing peptide sequence
KRRVGLNEPKR

SEQ ID NO: 1299 - protein, 11 aa, Artificial
  IGFBP-2 heparin binding domain-containing peptide sequence
RRRVGLNEPKR

SEQ ID NO: 1300 - protein, 11 aa, Artificial
  IGFBP-2 heparin binding domain-containing peptide sequence
HRRVGLNEPKR

SEQ ID NO: 1301 - protein, 11 aa, Artificial
  IGFBP-2 heparin binding domain-containing peptide sequence
KHHLGINEPKR

SEQ ID NO: 1302 - protein, 11 aa, Artificial
  IGFBP-2 heparin binding domain-containing peptide sequence
RHHLGINEPKR

SEQ ID NO: 1303 - protein, 11 aa, Artificial
  IGFBP-2 heparin binding domain-containing peptide sequence
HHHLGINEPKR

SEQ ID NO: 1304 - protein, 11 aa, Artificial
  IGFBP-2 heparin binding domain-containing peptide sequence
KKHLGINEPKR

SEQ ID NO: 1305 - protein, 11 aa, Artificial
  IGFBP-2 heparin binding domain-containing peptide sequence
RKHLGINEPKR

SEQ ID NO: 1306 - protein, 11 aa, Artificial
  IGFBP-2 heparin binding domain-containing peptide sequence
HKHLGINEPKR

SEQ ID NO: 1307 - protein, 11 aa, Artificial
  IGFBP-2 heparin binding domain-containing peptide sequence
KRHLGINEPKR

SEQ ID NO: 1308 - protein, 11 aa, Artificial
  IGFBP-2 heparin binding domain-containing peptide sequence
RRHLGINEPKR

SEQ ID NO: 1309 - protein, 11 aa, Artificial
  IGFBP-2 heparin binding domain-containing peptide sequence
HRHLGINEPKR

SEQ ID NO: 1310 - protein, 11 aa, Artificial
  IGFBP-2 heparin binding domain-containing peptide sequence
KHKLGINEPKR

SEQ ID NO: 1311 - protein, 11 aa, Artificial
  IGFBP-2 heparin binding domain-containing peptide sequence
RHKLGINEPKR

SEQ ID NO: 1312 - protein, 11 aa, Artificial
  IGFBP-2 heparin binding domain-containing peptide sequence
HHKLGINEPKR

SEQ ID NO: 1313 - protein, 11 aa, Artificial
  IGFBP-2 heparin binding domain-containing peptide sequence
KKKLGINEPKR

SEQ ID NO: 1314 - protein, 11 aa, Artificial
  IGFBP-2 heparin binding domain-containing peptide sequence
RKKLGINEPKR

SEQ ID NO: 1315 - protein, 11 aa, Artificial
  IGFBP-2 heparin binding domain-containing peptide sequence
HKKLGINEPKR

SEQ ID NO: 1316 - protein, 11 aa, Artificial
  IGFBP-2 heparin binding domain-containing peptide sequence
KRKLGINEPKR

SEQ ID NO: 1317 - protein, 11 aa, Artificial
  IGFBP-2 heparin binding domain-containing peptide sequence
RRKLGINEPKR

SEQ ID NO: 1318 - protein, 11 aa, Artificial
  IGFBP-2 heparin binding domain-containing peptide sequence
HRKLGINEPKR

SEQ ID NO: 1319 - protein, 11 aa, Artificial
  IGFBP-2 heparin binding domain-containing peptide sequence
KHRLGINEPKR

SEQ ID NO: 1320 - protein, 11 aa, Artificial
  IGFBP-2 heparin binding domain-containing peptide sequence
RHRLGINEPKR

SEQ ID NO: 1321 - protein, 11 aa, Artificial
  IGFBP-2 heparin binding domain-containing peptide sequence
HHRLGINEPKR

SEQ ID NO: 1322 - protein, 11 aa, Artificial
  IGFBP-2 heparin binding domain-containing peptide sequence
KKRLGINEPKR

SEQ ID NO: 1323 - protein, 11 aa, Artificial
  IGFBP-2 heparin binding domain-containing peptide sequence
RKRLGINEPKR

SEQ ID NO: 1324 - protein, 11 aa, Artificial
  IGFBP-2 heparin binding domain-containing peptide sequence
HKRLGINEPKR

SEQ ID NO: 1325 - protein, 11 aa, Artificial
  IGFBP-2 heparin binding domain-containing peptide sequence
KRRLGINEPKR

SEQ ID NO: 1326 - protein, 11 aa, Artificial
  IGFBP-2 heparin binding domain-containing peptide sequence
RRRLGINEPKR

SEQ ID NO: 1327 - protein, 11 aa, Artificial
  IGFBP-2 heparin binding domain-containing peptide sequence
HRRLGINEPKR

SEQ ID NO: 1328 - protein, 11 aa, Artificial
  IGFBP-2 heparin binding domain-containing peptide sequence
KHHIGIENPKR

SEQ ID NO: 1329 - protein, 11 aa, Artificial
  IGFBP-2 heparin binding domain-containing peptide sequence
RHHIGINEPKR

SEQ ID NO: 1330 - protein, 11 aa, Artificial
  IGFBP-2 heparin binding domain-containing peptide sequence
HHHIGINEPKR

SEQ ID NO: 1331 - protein, 11 aa, Artificial
  IGFBP-2 heparin binding domain-containing peptide sequence
KKHIGINEPKR

SEQ ID NO: 1332 - protein, 11 aa, Artificial
  IGFBP-2 heparin binding domain-containing peptide sequence
RKHIGINEPKR

SEQ ID NO: 1333 - protein, 11 aa, Artificial
  IGFBP-2 heparin binding domain-containing peptide sequence
HKHIGINEPKR

SEQ ID NO: 1334 - protein, 11 aa, Artificial
  IGFBP-2 heparin binding domain-containing peptide sequence
KRHIGINEPKR

SEQ ID NO: 1335 - protein, 11 aa, Artificial
  IGFBP-2 heparin binding domain-containing peptide sequence
RRHIGINEPKR

SEQ ID NO: 1336 - protein, 11 aa, Artificial
  IGFBP-2 heparin binding domain-containing peptide sequence
HRHIGINEPKR

SEQ ID NO: 1337 - protein, 11 aa, Artificial
  IGFBP-2 heparin binding domain-containing peptide sequence
KHKIGINEPKR

SEQ ID NO: 1338 - protein, 11 aa, Artificial
  IGFBP-2 heparin binding domain-containing peptide sequence
RHKIGINEPKR

SEQ ID NO: 1339 - protein, 11 aa, Artificial
  IGFBP-2 heparin binding domain-containing peptide sequence
HHKIGINEPKR

SEQ ID NO: 1340 - protein, 11 aa, Artificial
  IGFBP-2 heparin binding domain-containing peptide sequence
KKKIGINEPKR

SEQ ID NO: 1341 - protein, 11 aa, Artificial
  IGFBP-2 heparin binding domain-containing peptide sequence
RKKIGINEPKR

SEQ ID NO: 1342 - protein, 11 aa, Artificial
  IGFBP-2 heparin binding domain-containing peptide sequence
HKKIGINEPKR

SEQ ID NO: 1343 - protein, 11 aa, Artificial
  IGFBP-2 heparin binding domain-containing peptide sequence
KRKIGINEPKR

SEQ ID NO: 1344 - protein, 11 aa, Artificial
  IGFBP-2 heparin binding domain-containing peptide sequence
RRKIGINEPKR

SEQ ID NO: 1345 - protein, 11 aa, Artificial
  IGFBP-2 heparin binding domain-containing peptide sequence
HRKIGINEPKR

SEQ ID NO: 1346 - protein, 11 aa, Artificial
  IGFBP-2 heparin binding domain-containing peptide sequence
KHRIGINEPKR

SEQ ID NO: 1347 - protein, 11 aa, Artificial
  IGFBP-2 heparin binding domain-containing peptide sequence
RHRIGINEPKR

SEQ ID NO: 1348 - protein, 11 aa, Artificial
  IGFBP-2 heparin binding domain-containing peptide sequence
HHRIGINEPKR

SEQ ID NO: 1349 - protein, 11 aa, Artificial
  IGFBP-2 heparin binding domain-containing peptide sequence
KKRIGINEPKR

SEQ ID NO: 1350 - protein, 11 aa, Artificial
  IGFBP-2 heparin binding domain-containing peptide sequence
RKRIGINEPKR

SEQ ID NO: 1351 - protein, 11 aa, Artificial
  IGFBP-2 heparin binding domain-containing peptide sequence
HKRIGINEPKR

SEQ ID NO: 1352 - protein, 11 aa, Artificial
  IGFBP-2 heparin binding domain-containing peptide sequence
KRRIGINEPKR

SEQ ID NO: 1353 - protein, 11 aa, Artificial
  IGFBP-2 heparin binding domain-containing peptide sequence
RRRIGINEPKR

SEQ ID NO: 1354 - protein, 11 aa, Artificial
  IGFBP-2 heparin binding domain-containing peptide sequence
HRRIGINEPKR

SEQ ID NO: 1355 - protein, 11 aa, Artificial
  IGFBP-2 heparin binding domain-containing peptide sequence
KHHVGINEPKR

SEQ ID NO: 1356 - protein, 11 aa, Artificial
  IGFBP-2 heparin binding domain-containing peptide sequence
RHHVGINEPKR

SEQ ID NO: 1357 - protein, 11 aa, Artificial
  IGFBP-2 heparin binding domain-containing peptide sequence
HHHVGINEPKR

SEQ ID NO: 1358 - protein, 11 aa, Artificial
  IGFBP-2 heparin binding domain-containing peptide sequence
KKHVGINEPKR

SEQ ID NO: 1359 - protein, 11 aa, Artificial
  IGFBP-2 heparin binding domain-containing peptide sequence
RKHVGINEPKR

SEQ ID NO: 1360 - protein, 11 aa, Artificial
  IGFBP-2 heparin binding domain-containing peptide sequence
HKHVGINEPKR

SEQ ID NO: 1361 - protein, 11 aa, Artificial
  IGFBP-2 heparin binding domain-containing peptide sequence
KRHVGINEPKR

SEQ ID NO: 1362 - protein, 11 aa, Artificial
  IGFBP-2 heparin binding domain-containing peptide sequence
RRHVGINEPKR

SEQ ID NO: 1363 - protein, 11 aa, Artificial
  IGFBP-2 heparin binding domain-containing peptide sequence
HRHVGINEPKR

SEQ ID NO: 1364 - protein, 11 aa, Artificial
  IGFBP-2 heparin binding domain-containing peptide sequence
KHKVGINEPKR

SEQ ID NO: 1365 - protein, 11 aa, Artificial
  IGFBP-2 heparin binding domain-containing peptide sequence
RHKVGINEPKR

SEQ ID NO: 1366 - protein, 11 aa, Artificial
  IGFBP-2 heparin binding domain-containing peptide sequence
HHKVGINEPKR

SEQ ID NO: 1367 - protein, 11 aa, Artificial
  IGFBP-2 heparin binding domain-containing peptide sequence
KKKVGINEPKR

SEQ ID NO: 1368 - protein, 11 aa, Artificial
  IGFBP-2 heparin binding domain-containing peptide sequence
RKKVGINEPKR

SEQ ID NO: 1369 - protein, 11 aa, Artificial
  IGFBP-2 heparin binding domain-containing peptide sequence
HKKVGINEPKR

SEQ ID NO: 1370 - protein, 11 aa, Artificial
  IGFBP-2 heparin binding domain-containing peptide sequence
KRKVGINEPKR

SEQ ID NO: 1371 - protein, 11 aa, Artificial
  IGFBP-2 heparin binding domain-containing peptide sequence
RRKVGINEPKR

SEQ ID NO: 1372 - protein, 11 aa, Artificial
  IGFBP-2 heparin binding domain-containing peptide sequence
HRKVGINEPKR

SEQ ID NO: 1373 - protein, 11 aa, Artificial
  IGFBP-2 heparin binding domain-containing peptide sequence
KHRVGINEPKR

SEQ ID NO: 1374 - protein, 11 aa, Artificial
  IGFBP-2 heparin binding domain-containing peptide sequence
RHRVGINEPKR

SEQ ID NO: 1375 - protein, 11 aa, Artificial
  IGFBP-2 heparin binding domain-containing peptide sequence
HHRVGINEPKR

SEQ ID NO: 1376 - protein, 11 aa, Artificial
  IGFBP-2 heparin binding domain-containing peptide sequence
KKRVGINEPKR

SEQ ID NO: 1377 - protein, 11 aa, Artificial
  IGFBP-2 heparin binding domain-containing peptide sequence
RKRVGINEPKR

SEQ ID NO: 1378 - protein, 11 aa, Artificial
  IGFBP-2 heparin binding domain-containing peptide sequence
HKRVGINEPKR

SEQ ID NO: 1379 - protein, 11 aa, Artificial
  IGFBP-2 heparin binding domain-containing peptide sequence
KRRVGINEPKR

SEQ ID NO: 1380 - protein, 11 aa, Artificial
  IGFBP-2 heparin binding domain-containing peptide sequence
RRRVGINEPKR

SEQ ID NO: 1381 - protein, 11 aa, Artificial
  IGFBP-2 heparin binding domain-containing peptide sequence
HRRVGINEPKR

SEQ ID NO: 1382 - protein, 11 aa, Artificial
  IGFBP-2 heparin binding domain-containing peptide sequence
KHHLGVNEPKR

SEQ ID NO: 1383 - protein, 11 aa, Artificial
  IGFBP-2 heparin binding domain-containing peptide sequence
RHHLGVNEPKR

SEQ ID NO: 1384 - protein, 11 aa, Artificial
  IGFBP-2 heparin binding domain-containing peptide sequence
HHHLGVNEPKR

SEQ ID NO: 1385 - protein, 11 aa, Artificial
  IGFBP-2 heparin binding domain-containing peptide sequence
KKHLGVNEPKR

SEQ ID NO: 1386 - protein, 11 aa, Artificial
  IGFBP-2 heparin binding domain-containing peptide sequence
RKHLGVNEPKR

SEQ ID NO: 1387 - protein, 11 aa, Artificial
  IGFBP-2 heparin binding domain-containing peptide sequence
HKHLGVNEPKR

SEQ ID NO: 1388 - protein, 11 aa, Artificial
  IGFBP-2 heparin binding domain-containing peptide sequence
KRHLGVNEPKR

SEQ ID NO: 1389 - protein, 11 aa, Artificial
  IGFBP-2 heparin binding domain-containing peptide sequence
RRHLGVNEPKR

SEQ ID NO: 1390 - protein, 11 aa, Artificial
  IGFBP-2 heparin binding domain-containing peptide sequence
HRHLGVNEPKR

SEQ ID NO: 1391 - protein, 11 aa, Artificial
  IGFBP-2 heparin binding domain-containing peptide sequence
KHKLGVNEPKR

SEQ ID NO: 1392 - protein, 11 aa, Artificial
  IGFBP-2 heparin binding domain-containing peptide sequence
RHKLGVNEPKR

SEQ ID NO: 1393 - protein, 11 aa, Artificial
  IGFBP-2 heparin binding domain-containing peptide sequence
HHKLGVNEPKR

SEQ ID NO: 1394 - protein, 11 aa, Artificial
  IGFBP-2 heparin binding domain-containing peptide sequence
KKKLGVNEPKR

SEQ ID NO: 1395 - protein, 11 aa, Artificial
  IGFBP-2 heparin binding domain-containing peptide sequence
RKKLGVNEPKR

SEQ ID NO: 1396 - protein, 11 aa, Artificial
  IGFBP-2 heparin binding domain-containing peptide sequence
HKKLGVNEPKR

SEQ ID NO: 1397 - protein, 11 aa, Artificial
  IGFBP-2 heparin binding domain-containing peptide sequence
KRKLGVNEPKR

SEQ ID NO: 1398 - protein, 11 aa, Artificial
  IGFBP-2 heparin binding domain-containing peptide sequence
RRKLGVNEPKR

SEQ ID NO: 1399 - protein, 11 aa, Artificial
  IGFBP-2 heparin binding domain-containing peptide sequence
HRKLGVNEPKR

SEQ ID NO: 1400 - protein, 11 aa, Artificial
  IGFBP-2 heparin binding domain-containing peptide sequence
KHRLGVNEPKR

SEQ ID NO: 1401 - protein, 11 aa, Artificial
  IGFBP-2 heparin binding domain-containing peptide sequence
RHRLGVNEPKR

SEQ ID NO: 1402 - protein, 11 aa, Artificial
  IGFBP-2 heparin binding domain-containing peptide sequence
HHRLGVNEPKR

SEQ ID NO: 1403 - protein, 11 aa, Artificial
  IGFBP-2 heparin binding domain-containing peptide sequence
KKRLGVNEPKR

SEQ ID NO: 1404 - protein, 11 aa, Artificial
  IGFBP-2 heparin binding domain-containing peptide sequence
RKRLGVNEPKR

SEQ ID NO: 1405 - protein, 11 aa, Artificial
  IGFBP-2 heparin binding domain-containing peptide sequence
HKRLGVNEPKR

SEQ ID NO: 1406 - protein, 11 aa, Artificial
  IGFBP-2 heparin binding domain-containing peptide sequence
KRRLGVNEPKR

SEQ ID NO: 1407 - protein, 11 aa, Artificial
  IGFBP-2 heparin binding domain-containing peptide sequence
RRRLGVNEPKR

SEQ ID NO: 1408 - protein, 11 aa, Artificial
  IGFBP-2 heparin binding domain-containing peptide sequence
HRRLGVNEPKR

SEQ ID NO: 1409 - protein, 11 aa, Artificial
  IGFBP-2 heparin binding domain-containing peptide sequence
KHHIGVNEPKR

SEQ ID NO: 1410 - protein, 11 aa, Artificial
  IGFBP-2 heparin binding domain-containing peptide sequence
RHHIGVNEPKR

SEQ ID NO: 1411 - protein, 11 aa, Artificial
  IGFBP-2 heparin binding domain-containing peptide sequence
HHHIGVNEPKR

SEQ ID NO: 1412 - protein, 11 aa, Artificial
  IGFBP-2 heparin binding domain-containing peptide sequence
KKHIGVNEPKR

SEQ ID NO: 1413 - protein, 11 aa, Artificial
  IGFBP-2 heparin binding domain-containing peptide sequence
RKHIGVNEPKR

SEQ ID NO: 1414 - protein, 11 aa, Artificial
  IGFBP-2 heparin binding domain-containing peptide sequence
HKHIGVNEPKR

SEQ ID NO: 1415 - protein, 11 aa, Artificial
  IGFBP-2 heparin binding domain-containing peptide sequence
KRHIGVNEPKR

SEQ ID NO: 1416 - protein, 11 aa, Artificial
  IGFBP-2 heparin binding domain-containing peptide sequence
RRHIGVNEPKR

SEQ ID NO: 1417 - protein, 11 aa, Artificial
  IGFBP-2 heparin binding domain-containing peptide sequence
HRHIGVNEPKR

SEQ ID NO: 1418 - protein, 11 aa, Artificial
  IGFBP-2 heparin binding domain-containing peptide sequence
KHKIGVNEPKR

SEQ ID NO: 1419 - protein, 11 aa, Artificial
  IGFBP-2 heparin binding domain-containing peptide sequence
RHKIGVNEPKR

SEQ ID NO: 1420 - protein, 11 aa, Artificial
  IGFBP-2 heparin binding domain-containing peptide sequence
HHKIGVNEPKR

SEQ ID NO: 1421 - protein, 11 aa, Artificial
  IGFBP-2 heparin binding domain-containing peptide sequence
KKKIGVNEPKR

SEQ ID NO: 1422 - protein, 11 aa, Artificial
  IGFBP-2 heparin binding domain-containing peptide sequence
RKKIGVNEPKR

SEQ ID NO: 1423 - protein, 11 aa, Artificial
  IGFBP-2 heparin binding domain-containing peptide sequence
HKKIGVNEPKR

SEQ ID NO: 1424 - protein, 11 aa, Artificial
  IGFBP-2 heparin binding domain-containing peptide sequence
KRKIGVNEPKR

SEQ ID NO: 1425 - protein, 11 aa, Artificial
  IGFBP-2 heparin binding domain-containing peptide sequence
RRKIGVNEPKR

SEQ ID NO: 1426 - protein, 11 aa, Artificial
  IGFBP-2 heparin binding domain-containing peptide sequence
HRKIGVNEPKR

SEQ ID NO: 1427 - protein, 11 aa, Artificial
  IGFBP-2 heparin binding domain-containing peptide sequence
KHRIGVNEPKR

SEQ ID NO: 1428 - protein, 11 aa, Artificial
  IGFBP-2 heparin binding domain-containing peptide sequence
RHRIGVNEPKR

SEQ ID NO: 1429 - protein, 11 aa, Artificial
  IGFBP-2 heparin binding domain-containing peptide sequence
HHRIGVNEPKR

SEQ ID NO: 1430 - protein, 11 aa, Artificial
  IGFBP-2 heparin binding domain-containing peptide sequence
KKRIGVNEPKR

SEQ ID NO: 1431 - protein, 11 aa, Artificial
  IGFBP-2 heparin binding domain-containing peptide sequence
RKRIGVNEPKR

SEQ ID NO: 1432 - protein, 11 aa, Artificial
  IGFBP-2 heparin binding domain-containing peptide sequence
HKRIGVNEPKR

SEQ ID NO: 1433 - protein, 11 aa, Artificial
  IGFBP-2 heparin binding domain-containing peptide sequence
KRRIGVNEPKR

SEQ ID NO: 1434 - protein, 11 aa, Artificial
  IGFBP-2 heparin binding domain-containing peptide sequence
RRRIGVNEPKR

SEQ ID NO: 1435 - protein, 11 aa, Artificial
  IGFBP-2 heparin binding domain-containing peptide sequence
HRRIGVNEPKR

SEQ ID NO: 1436 - protein, 11 aa, Artificial
  IGFBP-2 heparin binding domain-containing peptide sequence
KHHVGVNEPKR

SEQ ID NO: 1437 - protein, 11 aa, Artificial
  IGFBP-2 heparin binding domain-containing peptide sequence
RHHVGVNEPKR

SEQ ID NO: 1438 - protein, 11 aa, Artificial
  IGFBP-2 heparin binding domain-containing peptide sequence
HHHVGVNEPKR

SEQ ID NO: 1439 - protein, 11 aa, Artificial
  IGFBP-2 heparin binding domain-containing peptide sequence
KKHVGVNEPKR

SEQ ID NO: 1440 - protein, 11 aa, Artificial
  IGFBP-2 heparin binding domain-containing peptide sequence
RKHVGVNEPKR

SEQ ID NO: 1441 - protein, 11 aa, Artificial
  IGFBP-2 heparin binding domain-containing peptide sequence
HKHVGVNEPKR

SEQ ID NO: 1442 - protein, 11 aa, Artificial
  IGFBP-2 heparin binding domain-containing peptide sequence
KRHVGVNEPKR

SEQ ID NO: 1443 - protein, 11 aa, Artificial
  IGFBP-2 heparin binding domain-containing peptide sequence
RRHVGVNEPKR

SEQ ID NO: 1444 - protein, 11 aa, Artificial
  IGFBP-2 heparin binding domain-containing peptide sequence
HRHVGVNEPKR

SEQ ID NO: 1445 - protein, 11 aa, Artificial
  IGFBP-2 heparin binding domain-containing peptide sequence
KHKVGVNEPKR

SEQ ID NO: 1446 - protein, 11 aa, Artificial
  IGFBP-2 heparin binding domain-containing peptide sequence
RHKVGVNEPKR

SEQ ID NO: 1447 - protein, 11 aa, Artificial
  IGFBP-2 heparin binding domain-containing peptide sequence
HHKVGVNEPKR

SEQ ID NO: 1448 - protein, 11 aa, Artificial
  IGFBP-2 heparin binding domain-containing peptide sequence
KKKVGVNEPKR

SEQ ID NO: 1449 - protein, 11 aa, Artificial
  IGFBP-2 heparin binding domain-containing peptide sequence
RKKVGVNEPKR

SEQ ID NO: 1450 - protein, 11 aa, Artificial
  IGFBP-2 heparin binding domain-containing peptide sequence
HKKVGVNEPKR

SEQ ID NO: 1451 - protein, 11 aa, Artificial
  IGFBP-2 heparin binding domain-containing peptide sequence
KRKVGVNEPKR

SEQ ID NO: 1452 - protein, 11 aa, Artificial
  IGFBP-2 heparin binding domain-containing peptide sequence
RRKVGVNEPKR

SEQ ID NO: 1453 - protein, 11 aa, Artificial
  IGFBP-2 heparin binding domain-containing peptide sequence
HRKVGVNEPKR

SEQ ID NO: 1454 - protein, 11 aa, Artificial
  IGFBP-2 heparin binding domain-containing peptide sequence
KHRVGVNEPKR

SEQ ID NO: 1455 - protein, 11 aa, Artificial
  IGFBP-2 heparin binding domain-containing peptide sequence
RHRVGVNEPKR

SEQ ID NO: 1456 - protein, 11 aa, Artificial
  IGFBP-2 heparin binding domain-containing peptide sequence
HHRVGVNEPKR

SEQ ID NO: 1457 - protein, 11 aa, Artificial
  IGFBP-2 heparin binding domain-containing peptide sequence
KKRVGVNEPKR

SEQ ID NO: 1458 - protein, 11 aa, Artificial
  IGFBP-2 heparin binding domain-containing peptide sequence
RKRVGVNEPKR

SEQ ID NO: 1459 - protein, 11 aa, Artificial
  IGFBP-2 heparin binding domain-containing peptide sequence
HKRVGVNEPKR

SEQ ID NO: 1460 - protein, 11 aa, Artificial
  IGFBP-2 heparin binding domain-containing peptide sequence
KRRVGVNEPKR

SEQ ID NO: 1461 - protein, 11 aa, Artificial
  IGFBP-2 heparin binding domain-containing peptide sequence
RRRVGVNEPKR

SEQ ID NO: 1462 - protein, 11 aa, Artificial
  IGFBP-2 heparin binding domain-containing peptide sequence
HRRVGVNEPKR

SEQ ID NO: 1463 - protein, 11 aa, Artificial
  IGFBP-2 heparin binding domain-containing peptide sequence
KHHLGLENPKR

SEQ ID NO: 1464 - protein, 11 aa, Artificial
  IGFBP-2 heparin binding domain-containing peptide sequence
RHHLGLENPKR

SEQ ID NO: 1465 - protein, 11 aa, Artificial
  IGFBP-2 heparin binding domain-containing peptide sequence
HHHLGLENPKR

SEQ ID NO: 1466 - protein, 11 aa, Artificial
  IGFBP-2 heparin binding domain-containing peptide sequence
KKHLGLENPKR

SEQ ID NO: 1467 - protein, 11 aa, Artificial
  IGFBP-2 heparin binding domain-containing peptide sequence
RKHLGLENPKR

SEQ ID NO: 1468 - protein, 11 aa, Artificial
  IGFBP-2 heparin binding domain-containing peptide sequence
HKHLGLENPKR

SEQ ID NO: 1469 - protein, 11 aa, Artificial
  IGFBP-2 heparin binding domain-containing peptide sequence
KRHLGLENPKR

SEQ ID NO: 1470 - protein, 11 aa, Artificial
  IGFBP-2 heparin binding domain-containing peptide sequence
RRHLGLENPKR

SEQ ID NO: 1471 - protein, 11 aa, Artificial
  IGFBP-2 heparin binding domain-containing peptide sequence
HRHLGLENPKR

SEQ ID NO: 1472 - protein, 11 aa, Artificial
  IGFBP-2 heparin binding domain-containing peptide sequence
KHKLGLENPKR

SEQ ID NO: 1473 - protein, 11 aa, Artificial
  IGFBP-2 heparin binding domain-containing peptide sequence
RHKLGLENPKR

SEQ ID NO: 1474 - protein, 11 aa, Artificial
  IGFBP-2 heparin binding domain-containing peptide sequence
HHKLGLENPKR

SEQ ID NO: 1475 - protein, 11 aa, Artificial
  IGFBP-2 heparin binding domain-containing peptide sequence
KKKLGLENPKR

SEQ ID NO: 1476 - protein, 11 aa, Artificial
  IGFBP-2 heparin binding domain-containing peptide sequence
RKKLGLENPKR

SEQ ID NO: 1477 - protein, 11 aa, Artificial
  IGFBP-2 heparin binding domain-containing peptide sequence
HKKLGLENPKR

SEQ ID NO: 1478 - protein, 11 aa, Artificial
  IGFBP-2 heparin binding domain-containing peptide sequence
KRKLGLENPKR

SEQ ID NO: 1479 - protein, 11 aa, Artificial
  IGFBP-2 heparin binding domain-containing peptide sequence
RRKLGLENPKR

SEQ ID NO: 1480 - protein, 11 aa, Artificial
  IGFBP-2 heparin binding domain-containing peptide sequence
HRKLGLENPKR

SEQ ID NO: 1481 - protein, 11 aa, Artificial
  IGFBP-2 heparin binding domain-containing peptide sequence
KHRLGLENPKR

SEQ ID NO: 1482 - protein, 11 aa, Artificial
  IGFBP-2 heparin binding domain-containing peptide sequence
RHRLGLENPKR

SEQ ID NO: 1483 - protein, 11 aa, Artificial
  IGFBP-2 heparin binding domain-containing peptide sequence
HHRLGLENPKR

SEQ ID NO: 1484 - protein, 11 aa, Artificial
  IGFBP-2 heparin binding domain-containing peptide sequence
KKRLGLENPKR

SEQ ID NO: 1485 - protein, 11 aa, Artificial
  IGFBP-2 heparin binding domain-containing peptide sequence
RKRLGLENPKR

SEQ ID NO: 1486 - protein, 11 aa, Artificial
  IGFBP-2 heparin binding domain-containing peptide sequence
HKRLGLENPKR

SEQ ID NO: 1487 - protein, 11 aa, Artificial
  IGFBP-2 heparin binding domain-containing peptide sequence
KRRLGLENPKR

SEQ ID NO: 1488 - protein, 11 aa, Artificial
  IGFBP-2 heparin binding domain-containing peptide sequence
RRRLGLENPKR

SEQ ID NO: 1489 - protein, 11 aa, Artificial
  IGFBP-2 heparin binding domain-containing peptide sequence
HRRLGLENPKR

SEQ ID NO: 1490 - protein, 11 aa, Artificial
  IGFBP-2 heparin binding domain-containing peptide sequence
KHHIGLENPKR

SEQ ID NO: 1491 - protein, 11 aa, Artificial
  IGFBP-2 heparin binding domain-containing peptide sequence
RHHIGLENPKR

SEQ ID NO: 1492 - protein, 11 aa, Artificial
  IGFBP-2 heparin binding domain-containing peptide sequence
HHHIGLENPKR

SEQ ID NO: 1493 - protein, 11 aa, Artificial
  IGFBP-2 heparin binding domain-containing peptide sequence
KKHIGLENPKR

SEQ ID NO: 1494 - protein, 11 aa, Artificial
  IGFBP-2 heparin binding domain-containing peptide sequence
RKHIGLENPKR

SEQ ID NO: 1495 - protein, 11 aa, Artificial
  IGFBP-2 heparin binding domain-containing peptide sequence
HKHIGLENPKR

SEQ ID NO: 1496 - protein, 11 aa, Artificial
  IGFBP-2 heparin binding domain-containing peptide sequence
KRHIGLENPKR

SEQ ID NO: 1497 - protein, 11 aa, Artificial
  IGFBP-2 heparin binding domain-containing peptide sequence
RRHIGLENPKR

SEQ ID NO: 1498 - protein, 11 aa, Artificial
  IGFBP-2 heparin binding domain-containing peptide sequence
HRHIGLENPKR

SEQ ID NO: 1499 - protein, 11 aa, Artificial
  IGFBP-2 heparin binding domain-containing peptide sequence
KHKIGLENPKR

SEQ ID NO: 1500 - protein, 11 aa, Artificial
  IGFBP-2 heparin binding domain-containing peptide sequence
RHKIGLENPKR

SEQ ID NO: 1501 - protein, 11 aa, Artificial
  IGFBP-2 heparin binding domain-containing peptide sequence
HHKIGLENPKR

SEQ ID NO: 1502 - protein, 11 aa, Artificial
  IGFBP-2 heparin binding domain-containing peptide sequence
KKKIGLENPKR

SEQ ID NO: 1503 - protein, 11 aa, Artificial
  IGFBP-2 heparin binding domain-containing peptide sequence
RKKIGLENPKR

SEQ ID NO: 1504 - protein, 11 aa, Artificial
  IGFBP-2 heparin binding domain-containing peptide sequence
HKKIGLENPKR

SEQ ID NO: 1505 - protein, 11 aa, Artificial
  IGFBP-2 heparin binding domain-containing peptide sequence
KRKIGLENPKR

SEQ ID NO: 1506 - protein, 11 aa, Artificial
  IGFBP-2 heparin binding domain-containing peptide sequence
RRKIGLENPKR

SEQ ID NO: 1507 - protein, 11 aa, Artificial
  IGFBP-2 heparin binding domain-containing peptide sequence
HRKIGLENPKR

SEQ ID NO: 1508 - protein, 11 aa, Artificial
  IGFBP-2 heparin binding domain-containing peptide sequence
KHRIGLENPKR

SEQ ID NO: 1509 - protein, 11 aa, Artificial
  IGFBP-2 heparin binding domain-containing peptide sequence
RHRIGLENPKR

SEQ ID NO: 1510 - protein, 11 aa, Artificial
  IGFBP-2 heparin binding domain-containing peptide sequence
HHRIGLENPKR

SEQ ID NO: 1511 - protein, 11 aa, Artificial
  IGFBP-2 heparin binding domain-containing peptide sequence
KKRIGLENPKR

SEQ ID NO: 1512 - protein, 11 aa, Artificial
  IGFBP-2 heparin binding domain-containing peptide sequence
RKRIGLENPKR

SEQ ID NO: 1513 - protein, 11 aa, Artificial
  IGFBP-2 heparin binding domain-containing peptide sequence
HKRIGLENPKR

SEQ ID NO: 1514 - protein, 11 aa, Artificial
  IGFBP-2 heparin binding domain-containing peptide sequence
KRRIGLENPKR

SEQ ID NO: 1515 - protein, 11 aa, Artificial
  IGFBP-2 heparin binding domain-containing peptide sequence
RRRIGLENPKR

SEQ ID NO: 1516 - protein, 11 aa, Artificial
  IGFBP-2 heparin binding domain-containing peptide sequence
HRRIGLENPKR

SEQ ID NO: 1517 - protein, 11 aa, Artificial
  IGFBP-2 heparin binding domain-containing peptide sequence
KHHVGLENPKR

SEQ ID NO: 1518 - protein, 11 aa, Artificial
  IGFBP-2 heparin binding domain-containing peptide sequence
RHHVGLENPKR

SEQ ID NO: 1519 - protein, 11 aa, Artificial
  IGFBP-2 heparin binding domain-containing peptide sequence
HHHVGLENPKR

SEQ ID NO: 1520 - protein, 11 aa, Artificial
  IGFBP-2 heparin binding domain-containing peptide sequence
KKHVGLENPKR

SEQ ID NO: 1521 - protein, 11 aa, Artificial
  IGFBP-2 heparin binding domain-containing peptide sequence
RKHVGLENPKR

SEQ ID NO: 1522 - protein, 11 aa, Artificial
  IGFBP-2 heparin binding domain-containing peptide sequence
HKHVGLENPKR

SEQ ID NO: 1523 - protein, 11 aa, Artificial
  IGFBP-2 heparin binding domain-containing peptide sequence
KRHVGLENPKR

SEQ ID NO: 1524 - protein, 11 aa, Artificial
  IGFBP-2 heparin binding domain-containing peptide sequence
RRHVGLENPKR

SEQ ID NO: 1525 - protein, 11 aa, Artificial
  IGFBP-2 heparin binding domain-containing peptide sequence
HRHVGLENPKR

SEQ ID NO: 1526 - protein, 11 aa, Artificial
  IGFBP-2 heparin binding domain-containing peptide sequence
KHKVGLENPKR

SEQ ID NO: 1527 - protein, 11 aa, Artificial
  IGFBP-2 heparin binding domain-containing peptide sequence
RHKVGLENPKR

SEQ ID NO: 1528 - protein, 11 aa, Artificial
  IGFBP-2 heparin binding domain-containing peptide sequence
HHKVGLENPKR

SEQ ID NO: 1529 - protein, 11 aa, Artificial
  IGFBP-2 heparin binding domain-containing peptide sequence
KKKVGLENPKR

SEQ ID NO: 1530 - protein, 11 aa, Artificial
  IGFBP-2 heparin binding domain-containing peptide sequence
RKKVGLENPKR

SEQ ID NO: 1531 - protein, 11 aa, Artificial
  IGFBP-2 heparin binding domain-containing peptide sequence
HKKVGLENPKR

SEQ ID NO: 1532 - protein, 11 aa, Artificial
  IGFBP-2 heparin binding domain-containing peptide sequence
KRKVGLENPKR

SEQ ID NO: 1533 - protein, 11 aa, Artificial
  IGFBP-2 heparin binding domain-containing peptide sequence
RRKVGLENPKR

SEQ ID NO: 1534 - protein, 11 aa, Artificial
  IGFBP-2 heparin binding domain-containing peptide sequence
HRKVGLENPKR

SEQ ID NO: 1535 - protein, 11 aa, Artificial
  IGFBP-2 heparin binding domain-containing peptide sequence
KHRVGLENPKR

SEQ ID NO: 1536 - protein, 11 aa, Artificial
  IGFBP-2 heparin binding domain-containing peptide sequence
RHRVGLENPKR

SEQ ID NO: 1537 - protein, 11 aa, Artificial
  IGFBP-2 heparin binding domain-containing peptide sequence
HHRVGLENPKR

SEQ ID NO: 1538 - protein, 11 aa, Artificial
  IGFBP-2 heparin binding domain-containing peptide sequence
KKRVGLENPKR

SEQ ID NO: 1539 - protein, 11 aa, Artificial
  IGFBP-2 heparin binding domain-containing peptide sequence
RKRVGLENPKR

SEQ ID NO: 1540 - protein, 11 aa, Artificial
  IGFBP-2 heparin binding domain-containing peptide sequence
HKRVGLENPKR

SEQ ID NO: 1541 - protein, 11 aa, Artificial
  IGFBP-2 heparin binding domain-containing peptide sequence
KRRVGLENPKR

SEQ ID NO: 1542 - protein, 11 aa, Artificial
  IGFBP-2 heparin binding domain-containing peptide sequence
RRRVGLENPKR

SEQ ID NO: 1543 - protein, 11 aa, Artificial
  IGFBP-2 heparin binding domain-containing peptide sequence
HRRVGLENPKR

SEQ ID NO: 1544 - protein, 11 aa, Artificial
  IGFBP-2 heparin binding domain-containing peptide sequence
KHHLGIENPKR

SEQ ID NO: 1545 - protein, 11 aa, Artificial
  IGFBP-2 heparin binding domain-containing peptide sequence
RHHLGIENPKR

SEQ ID NO: 1546 - protein, 11 aa, Artificial
  IGFBP-2 heparin binding domain-containing peptide sequence
HHHLGIENPKR

SEQ ID NO: 1547 - protein, 11 aa, Artificial
  IGFBP-2 heparin binding domain-containing peptide sequence
KKHLGIENPKR

SEQ ID NO: 1548 - protein, 11 aa, Artificial
  IGFBP-2 heparin binding domain-containing peptide sequence
RKHLGIENPKR

SEQ ID NO: 1549 - protein, 11 aa, Artificial
  IGFBP-2 heparin binding domain-containing peptide sequence
HKHLGIENPKR

SEQ ID NO: 1550 - protein, 11 aa, Artificial
  IGFBP-2 heparin binding domain-containing peptide sequence
KRHLGIENPKR

SEQ ID NO: 1551 - protein, 11 aa, Artificial
  IGFBP-2 heparin binding domain-containing peptide sequence
RRHLGIENPKR

SEQ ID NO: 1552 - protein, 11 aa, Artificial
  IGFBP-2 heparin binding domain-containing peptide sequence
HRHLGIENPKR

SEQ ID NO: 1553 - protein, 11 aa, Artificial
  IGFBP-2 heparin binding domain-containing peptide sequence
KHKLGIENPKR

SEQ ID NO: 1554 - protein, 11 aa, Artificial
  IGFBP-2 heparin binding domain-containing peptide sequence
RHKLGIENPKR

SEQ ID NO: 1555 - protein, 11 aa, Artificial
  IGFBP-2 heparin binding domain-containing peptide sequence
HHKLGIENPKR

SEQ ID NO: 1556 - protein, 11 aa, Artificial
  IGFBP-2 heparin binding domain-containing peptide sequence
KKKLGIENPKR

SEQ ID NO: 1557 - protein, 11 aa, Artificial
  IGFBP-2 heparin binding domain-containing peptide sequence
RKKLGIENPKR

SEQ ID NO: 1558 - protein, 11 aa, Artificial
  IGFBP-2 heparin binding domain-containing peptide sequence
HKKLGIENPKR

SEQ ID NO: 1559 - protein, 11 aa, Artificial
  IGFBP-2 heparin binding domain-containing peptide sequence
KRKLGIENPKR

SEQ ID NO: 1560 - protein, 11 aa, Artificial
  IGFBP-2 heparin binding domain-containing peptide sequence
RRKLGIENPKR

SEQ ID NO: 1561 - protein, 11 aa, Artificial
  IGFBP-2 heparin binding domain-containing peptide sequence
HRKLGIENPKR

SEQ ID NO: 1562 - protein, 11 aa, Artificial
  IGFBP-2 heparin binding domain-containing peptide sequence
KHRLGIENPKR

SEQ ID NO: 1563 - protein, 11 aa, Artificial
  IGFBP-2 heparin binding domain-containing peptide sequence
RHRLGIENPKR

SEQ ID NO: 1564 - protein, 11 aa, Artificial
  IGFBP-2 heparin binding domain-containing peptide sequence
HHRLGIENPKR

SEQ ID NO: 1565 - protein, 11 aa, Artificial
  IGFBP-2 heparin binding domain-containing peptide sequence
KKRLGIENPKR

SEQ ID NO: 1566 - protein, 11 aa, Artificial
  IGFBP-2 heparin binding domain-containing peptide sequence
RKRLGIENPKR

SEQ ID NO: 1567 - protein, 11 aa, Artificial
  IGFBP-2 heparin binding domain-containing peptide sequence
HKRLGIENPKR

SEQ ID NO: 1568 - protein, 11 aa, Artificial
  IGFBP-2 heparin binding domain-containing peptide sequence
KRRLGIENPKR

SEQ ID NO: 1569 - protein, 11 aa, Artificial
  IGFBP-2 heparin binding domain-containing peptide sequence
RRRLGIENPKR

SEQ ID NO: 1570 - protein, 11 aa, Artificial
  IGFBP-2 heparin binding domain-containing peptide sequence
HRRLGIENPKR

SEQ ID NO: 1571 - protein, 11 aa, Artificial
  IGFBP-2 heparin binding domain-containing peptide sequence
KHHIGIENPKR

SEQ ID NO: 1572 - protein, 11 aa, Artificial
  IGFBP-2 heparin binding domain-containing peptide sequence
RHHIGIENPKR

SEQ ID NO: 1573 - protein, 11 aa, Artificial
  IGFBP-2 heparin binding domain-containing peptide sequence
HHHIGIENPKR

SEQ ID NO: 1574 - protein, 11 aa, Artificial
  IGFBP-2 heparin binding domain-containing peptide sequence
KKHIGIENPKR

SEQ ID NO: 1575 - protein, 11 aa, Artificial
  IGFBP-2 heparin binding domain-containing peptide sequence
RKHIGIENPKR

SEQ ID NO: 1576 - protein, 11 aa, Artificial
  IGFBP-2 heparin binding domain-containing peptide sequence
HKHIGIENPKR

SEQ ID NO: 1577 - protein, 11 aa, Artificial
  IGFBP-2 heparin binding domain-containing peptide sequence
KRHIGIENPKR

SEQ ID NO: 1578 - protein, 11 aa, Artificial
  IGFBP-2 heparin binding domain-containing peptide sequence
RRHIGIENPKR

SEQ ID NO: 1579 - protein, 11 aa, Artificial
  IGFBP-2 heparin binding domain-containing peptide sequence
HRHIGIENPKR

SEQ ID NO: 1580 - protein, 11 aa, Artificial
  IGFBP-2 heparin binding domain-containing peptide sequence
KHKIGIENPKR

SEQ ID NO: 1581 - protein, 11 aa, Artificial
  IGFBP-2 heparin binding domain-containing peptide sequence
RHKIGIENPKR

SEQ ID NO: 1582 - protein, 11 aa, Artificial
  IGFBP-2 heparin binding domain-containing peptide sequence
HHKIGIENPKR

SEQ ID NO: 1583 - protein, 11 aa, Artificial
  IGFBP-2 heparin binding domain-containing peptide sequence
KKKIGIENPKR

SEQ ID NO: 1584 - protein, 11 aa, Artificial
  IGFBP-2 heparin binding domain-containing peptide sequence
RKKIGIENPKR

SEQ ID NO: 1585 - protein, 11 aa, Artificial
  IGFBP-2 heparin binding domain-containing peptide sequence
HKKIGIENPKR

SEQ ID NO: 1586 - protein, 11 aa, Artificial
  IGFBP-2 heparin binding domain-containing peptide sequence
KRKIGIENPKR

SEQ ID NO: 1587 - protein, 11 aa, Artificial
  IGFBP-2 heparin binding domain-containing peptide sequence
RRKIGIENPKR

SEQ ID NO: 1588 - protein, 11 aa, Artificial
  IGFBP-2 heparin binding domain-containing peptide sequence
HRKIGIENPKR

SEQ ID NO: 1589 - protein, 11 aa, Artificial
  IGFBP-2 heparin binding domain-containing peptide sequence
KHRIGIENPKR

SEQ ID NO: 1590 - protein, 11 aa, Artificial
  IGFBP-2 heparin binding domain-containing peptide sequence
RHRIGIENPKR

SEQ ID NO: 1591 - protein, 11 aa, Artificial
  IGFBP-2 heparin binding domain-containing peptide sequence
HHRIGIENPKR

SEQ ID NO: 1592 - protein, 11 aa, Artificial
  IGFBP-2 heparin binding domain-containing peptide sequence
KKRIGIENPKR

SEQ ID NO: 1593 - protein, 11 aa, Artificial
  IGFBP-2 heparin binding domain-containing peptide sequence
RKRIGIENPKR

SEQ ID NO: 1594 - protein, 11 aa, Artificial
  IGFBP-2 heparin binding domain-containing peptide sequence
HKRIGIENPKR

SEQ ID NO: 1595 - protein, 11 aa, Artificial
  IGFBP-2 heparin binding domain-containing peptide sequence
KRRIGIENPKR

SEQ ID NO: 1596 - protein, 11 aa, Artificial
  IGFBP-2 heparin binding domain-containing peptide sequence
RRRIGIENPKR

SEQ ID NO: 1597 - protein, 11 aa, Artificial
  IGFBP-2 heparin binding domain-containing peptide sequence
HRRIGIENPKR

SEQ ID NO: 1598 - protein, 11 aa, Artificial
  IGFBP-2 heparin binding domain-containing peptide sequence
KHHVGIENPKR

SEQ ID NO: 1599 - protein, 11 aa, Artificial
  IGFBP-2 heparin binding domain-containing peptide sequence
RHHVGIENPKR

SEQ ID NO: 1600 - protein, 11 aa, Artificial
  IGFBP-2 heparin binding domain-containing peptide sequence
HHHVGIENPKR

SEQ ID NO: 1601 - protein, 11 aa, Artificial
  IGFBP-2 heparin binding domain-containing peptide sequence
KKHVGIENPKR

SEQ ID NO: 1602 - protein, 11 aa, Artificial
  IGFBP-2 heparin binding domain-containing peptide sequence
RKHVGIENPKR

SEQ ID NO: 1603 - protein, 11 aa, Artificial
  IGFBP-2 heparin binding domain-containing peptide sequence
HKHVGIENPKR

SEQ ID NO: 1604 - protein, 11 aa, Artificial
  IGFBP-2 heparin binding domain-containing peptide sequence
KRHVGIENPKR

SEQ ID NO: 1605 - protein, 11 aa, Artificial
  IGFBP-2 heparin binding domain-containing peptide sequence
RRHVGIENPKR

SEQ ID NO: 1606 - protein, 11 aa, Artificial
  IGFBP-2 heparin binding domain-containing peptide sequence
HRHVGIENPKR

SEQ ID NO: 1607 - protein, 11 aa, Artificial
  IGFBP-2 heparin binding domain-containing peptide sequence
KHKVGIENPKR

SEQ ID NO: 1608 - protein, 11 aa, Artificial
  IGFBP-2 heparin binding domain-containing peptide sequence
RHKVGIENPKR

SEQ ID NO: 1609 - protein, 11 aa, Artificial
  IGFBP-2 heparin binding domain-containing peptide sequence
HHKVGIENPKR

SEQ ID NO: 1610 - protein, 11 aa, Artificial
  IGFBP-2 heparin binding domain-containing peptide sequence
KKKVGIENPKR

SEQ ID NO: 1611 - protein, 11 aa, Artificial
  IGFBP-2 heparin binding domain-containing peptide sequence
RKKVGIENPKR

SEQ ID NO: 1612 - protein, 11 aa, Artificial
  IGFBP-2 heparin binding domain-containing peptide sequence
HKKVGIENPKR

SEQ ID NO: 1613 - protein, 11 aa, Artificial
  IGFBP-2 heparin binding domain-containing peptide sequence
KRKVGIENPKR

SEQ ID NO: 1614 - protein, 11 aa, Artificial
  IGFBP-2 heparin binding domain-containing peptide sequence
RRKVGIENPKR

SEQ ID NO: 1615 - protein, 11 aa, Artificial
  IGFBP-2 heparin binding domain-containing peptide sequence
HRKVGIENPKR

SEQ ID NO: 1616 - protein, 11 aa, Artificial
  IGFBP-2 heparin binding domain-containing peptide sequence
KHRVGIENPKR

SEQ ID NO: 1617 - protein, 11 aa, Artificial
  IGFBP-2 heparin binding domain-containing peptide sequence
RHRVGIENPKR

SEQ ID NO: 1618 - protein, 11 aa, Artificial
  IGFBP-2 heparin binding domain-containing peptide sequence
HHRVGIENPKR

SEQ ID NO: 1619 - protein, 11 aa, Artificial
  IGFBP-2 heparin binding domain-containing peptide sequence
KKRVGIENPKR

SEQ ID NO: 1620 - protein, 11 aa, Artificial
  IGFBP-2 heparin binding domain-containing peptide sequence
RKRVGIENPKR

SEQ ID NO: 1621 - protein, 11 aa, Artificial
  IGFBP-2 heparin binding domain-containing peptide sequence
HKRVGIENPKR

SEQ ID NO: 1622 - protein, 11 aa, Artificial
  IGFBP-2 heparin binding domain-containing peptide sequence
KRRVGIENPKR

SEQ ID NO: 1623 - protein, 11 aa, Artificial
  IGFBP-2 heparin binding domain-containing peptide sequence
RRRVGIENPKR

SEQ ID NO: 1624 - protein, 11 aa, Artificial
  IGFBP-2 heparin binding domain-containing peptide sequence
HRRVGIENPKR

SEQ ID NO: 1625 - protein, 11 aa, Artificial
  IGFBP-2 heparin binding domain-containing peptide sequence
KHHLGVENPKR

SEQ ID NO: 1626 - protein, 11 aa, Artificial
  IGFBP-2 heparin binding domain-containing peptide sequence
RHHLGVENPKR

SEQ ID NO: 1627 - protein, 11 aa, Artificial
  IGFBP-2 heparin binding domain-containing peptide sequence
HHHLGVENPKR

SEQ ID NO: 1628 - protein, 11 aa, Artificial
  IGFBP-2 heparin binding domain-containing peptide sequence
KKHLGVENPKR

SEQ ID NO: 1629 - protein, 11 aa, Artificial
  IGFBP-2 heparin binding domain-containing peptide sequence
RKHLGVENPKR

SEQ ID NO: 1630 - protein, 11 aa, Artificial
  IGFBP-2 heparin binding domain-containing peptide sequence
HKHLGVENPKR

SEQ ID NO: 1631 - protein, 11 aa, Artificial
  IGFBP-2 heparin binding domain-containing peptide sequence
KRHLGVENPKR

SEQ ID NO: 1632 - protein, 11 aa, Artificial
  IGFBP-2 heparin binding domain-containing peptide sequence
RRHLGVENPKR

SEQ ID NO: 1633 - protein, 11 aa, Artificial
  IGFBP-2 heparin binding domain-containing peptide sequence
HRHLGVENPKR

SEQ ID NO: 1634 - protein, 11 aa, Artificial
  IGFBP-2 heparin binding domain-containing peptide sequence
KHKLGVENPKR

SEQ ID NO: 1635 - protein, 11 aa, Artificial
  IGFBP-2 heparin binding domain-containing peptide sequence
RHKLGVENPKR

SEQ ID NO: 1636 - protein, 11 aa, Artificial
  IGFBP-2 heparin binding domain-containing peptide sequence
HHKLGVENPKR

SEQ ID NO: 1637 - protein, 11 aa, Artificial
  IGFBP-2 heparin binding domain-containing peptide sequence
KKKLGVENPKR

SEQ ID NO: 1638 - protein, 11 aa, Artificial
  IGFBP-2 heparin binding domain-containing peptide sequence
RKKLGVENPKR

SEQ ID NO: 1639 - protein, 11 aa, Artificial
  IGFBP-2 heparin binding domain-containing peptide sequence
HKKLGVENPKR

SEQ ID NO: 1640 - protein, 11 aa, Artificial
  IGFBP-2 heparin binding domain-containing peptide sequence
KRKLGVENPKR

SEQ ID NO: 1641 - protein, 11 aa, Artificial
  IGFBP-2 heparin binding domain-containing peptide sequence
RRKLGVENPKR

SEQ ID NO: 1642 - protein, 11 aa, Artificial
  IGFBP-2 heparin binding domain-containing peptide sequence
HRKLGVENPKR

SEQ ID NO: 1643 - protein, 11 aa, Artificial
  IGFBP-2 heparin binding domain-containing peptide sequence
KHRLGVENPKR

SEQ ID NO: 1644 - protein, 11 aa, Artificial
  IGFBP-2 heparin binding domain-containing peptide sequence
RHRLGVENPKR

SEQ ID NO: 1645 - protein, 11 aa, Artificial
  IGFBP-2 heparin binding domain-containing peptide sequence
HHRLGVENPKR

SEQ ID NO: 1646 - protein, 11 aa, Artificial
  IGFBP-2 heparin binding domain-containing peptide sequence
KKRLGVENPKR

SEQ ID NO: 1647 - protein, 11 aa, Artificial
  IGFBP-2 heparin binding domain-containing peptide sequence
RKRLGVENPKR

SEQ ID NO: 1648 - protein, 11 aa, Artificial
  IGFBP-2 heparin binding domain-containing peptide sequence
HKRLGVENPKR

SEQ ID NO: 1649 - protein, 11 aa, Artificial
  IGFBP-2 heparin binding domain-containing peptide sequence
KRRLGVENPKR

SEQ ID NO: 1650 - protein, 11 aa, Artificial
  IGFBP-2 heparin binding domain-containing peptide sequence
RRRLGVENPKR

SEQ ID NO: 1651 - protein, 11 aa, Artificial
  IGFBP-2 heparin binding domain-containing peptide sequence
HRRLGVENPKR

SEQ ID NO: 1652 - protein, 11 aa, Artificial
  IGFBP-2 heparin binding domain-containing peptide sequence
KHHIGVENPKR

SEQ ID NO: 1653 - protein, 11 aa, Artificial
  IGFBP-2 heparin binding domain-containing peptide sequence
RHHIGVEEPKR

SEQ ID NO: 1654 - protein, 11 aa, Artificial
  IGFBP-2 heparin binding domain-containing peptide sequence
HHHIGVENPKR

SEQ ID NO: 1655 - protein, 11 aa, Artificial
  IGFBP-2 heparin binding domain-containing peptide sequence
KKHIGVENPKR

SEQ ID NO: 1656 - protein, 11 aa, Artificial
  IGFBP-2 heparin binding domain-containing peptide sequence
RKHIGVENPKR

SEQ ID NO: 1657 - protein, 11 aa, Artificial
  IGFBP-2 heparin binding domain-containing peptide sequence
HKHIGVENPKR

SEQ ID NO: 1658 - protein, 11 aa, Artificial
  IGFBP-2 heparin binding domain-containing peptide sequence
KRHIGVENPKR

SEQ ID NO: 1659 - protein, 11 aa, Artificial
  IGFBP-2 heparin binding domain-containing peptide sequence
RRHIGVENPKR

SEQ ID NO: 1660 - protein, 11 aa, Artificial
  IGFBP-2 heparin binding domain-containing peptide sequence
HRHIGVENPKR

SEQ ID NO: 1661 - protein, 11 aa, Artificial
  IGFBP-2 heparin binding domain-containing peptide sequence
KHKIGVENPKR

SEQ ID NO: 1662 - protein, 11 aa, Artificial
  IGFBP-2 heparin binding domain-containing peptide sequence
RHKIGVENPKR

SEQ ID NO: 1663 - protein, 11 aa, Artificial
  IGFBP-2 heparin binding domain-containing peptide sequence
HHKIGVENPKR

SEQ ID NO: 1664 - protein, 11 aa, Artificial
  IGFBP-2 heparin binding domain-containing peptide sequence
KKKIGVENPKR

SEQ ID NO: 1665 - protein, 11 aa, Artificial
  IGFBP-2 heparin binding domain-containing peptide sequence
RKKIGVENPKR

SEQ ID NO: 1666 - protein, 11 aa, Artificial
  IGFBP-2 heparin binding domain-containing peptide sequence
HKKIGVENPKR

SEQ ID NO: 1667 - protein, 11 aa, Artificial
  IGFBP-2 heparin binding domain-containing peptide sequence
KRKIGVENPKR

SEQ ID NO: 1668 - protein, 11 aa, Artificial
  IGFBP-2 heparin binding domain-containing peptide sequence
RRKIGVENPKR

SEQ ID NO: 1669 - protein, 11 aa, Artificial
  IGFBP-2 heparin binding domain-containing peptide sequence
HRKIGVENPKR

SEQ ID NO: 1670 - protein, 11 aa, Artificial
  IGFBP-2 heparin binding domain-containing peptide sequence
KHRIGVENPKR

SEQ ID NO: 1671 - protein, 11 aa, Artificial
  IGFBP-2 heparin binding domain-containing peptide sequence
RHRIGVENPKR

SEQ ID NO: 1672 - protein, 11 aa, Artificial
  IGFBP-2 heparin binding domain-containing peptide sequence
HHRIGVENPKR

SEQ ID NO: 1673 - protein, 11 aa, Artificial
  IGFBP-2 heparin binding domain-containing peptide sequence
KKRIGVENPKR

SEQ ID NO: 1674 - protein, 11 aa, Artificial
  IGFBP-2 heparin binding domain-containing peptide sequence
RKRIGVENPKR

SEQ ID NO: 1675 - protein, 11 aa, Artificial
  IGFBP-2 heparin binding domain-containing peptide sequence
HKRIGVENPKR

SEQ ID NO: 1676 - protein, 11 aa, Artificial
  IGFBP-2 heparin binding domain-containing peptide sequence
KRRIGVENPKR

SEQ ID NO: 1677 - protein, 11 aa, Artificial
  IGFBP-2 heparin binding domain-containing peptide sequence
RRRIGVENPKR

SEQ ID NO: 1678 - protein, 11 aa, Artificial
  IGFBP-2 heparin binding domain-containing peptide sequence
HRRIGVENPKR

SEQ ID NO: 1679 - protein, 11 aa, Artificial
  IGFBP-2 heparin binding domain-containing peptide sequence
KHHVGVENPKR

SEQ ID NO: 1680 - protein, 11 aa, Artificial
  IGFBP-2 heparin binding domain-containing peptide sequence
RHHVGVENPKR

SEQ ID NO: 1681 - protein, 11 aa, Artificial
  IGFBP-2 heparin binding domain-containing peptide sequence
HHHVGVENPKR

SEQ ID NO: 1682 - protein, 11 aa, Artificial
  IGFBP-2 heparin binding domain-containing peptide sequence
KKHVGVENPKR

SEQ ID NO: 1683 - protein, 11 aa, Artificial
  IGFBP-2 heparin binding domain-containing peptide sequence
RKHVGVENPKR

SEQ ID NO: 1684 - protein, 11 aa, Artificial
  IGFBP-2 heparin binding domain-containing peptide sequence
HKHVGVENPKR

SEQ ID NO: 1685 - protein, 11 aa, Artificial
  IGFBP-2 heparin binding domain-containing peptide sequence
KRHVGVENPKR

SEQ ID NO: 1686 - protein, 11 aa, Artificial
  IGFBP-2 heparin binding domain-containing peptide sequence
RRHVGVENPKR

SEQ ID NO: 1687 - protein, 11 aa, Artificial
  IGFBP-2 heparin binding domain-containing peptide sequence
HRHVGVENPKR

SEQ ID NO: 1688 - protein, 11 aa, Artificial
  IGFBP-2 heparin binding domain-containing peptide sequence
KHKVGVENPKR

SEQ ID NO: 1689 - protein, 11 aa, Artificial
  IGFBP-2 heparin binding domain-containing peptide sequence
RHKVGVENPKR

SEQ ID NO: 1690 - protein, 11 aa, Artificial
  IGFBP-2 heparin binding domain-containing peptide sequence
HHKVGVENPKR

SEQ ID NO: 1691 - protein, 11 aa, Artificial
  IGFBP-2 heparin binding domain-containing peptide sequence
KKKVGVENPKR

SEQ ID NO: 1692 - protein, 11 aa, Artificial
  IGFBP-2 heparin binding domain-containing peptide sequence
RKKVGVENPKR

SEQ ID NO: 1693 - protein, 11 aa, Artificial
  IGFBP-2 heparin binding domain-containing peptide sequence
HKKVGVENPKR

SEQ ID NO: 1694 - protein, 11 aa, Artificial
  IGFBP-2 heparin binding domain-containing peptide sequence
KRKVGVENPKR

SEQ ID NO: 1695 - protein, 11 aa, Artificial
  IGFBP-2 heparin binding domain-containing peptide sequence
RRKVGVEEPKR

SEQ ID NO: 1696 - protein, 11 aa, Artificial
  IGFBP-2 heparin binding domain-containing peptide sequence
HRKVGVENPKR

SEQ ID NO: 1697 - protein, 11 aa, Artificial
  IGFBP-2 heparin binding domain-containing peptide sequence
KHRVGVENPKR

SEQ ID NO: 1698 - protein, 11 aa, Artificial
  IGFBP-2 heparin binding domain-containing peptide sequence
RHRVGVENPKR

SEQ ID NO: 1699 - protein, 11 aa, Artificial
  IGFBP-2 heparin binding domain-containing peptide sequence
HHRVGVENPKR

SEQ ID NO: 1700 - protein, 11 aa, Artificial
  IGFBP-2 heparin binding domain-containing peptide sequence
KKRVGVENPKR

SEQ ID NO: 1701 - protein, 11 aa, Artificial
  IGFBP-2 heparin binding domain-containing peptide sequence
RKRVGVENPKR

SEQ ID NO: 1702 - protein, 11 aa, Artificial
  IGFBP-2 heparin binding domain-containing peptide sequence
HKRVGVENPKR

SEQ ID NO: 1703 - protein, 11 aa, Artificial
  IGFBP-2 heparin binding domain-containing peptide sequence
KRRVGVENPKR

SEQ ID NO: 1704 - protein, 11 aa, Artificial
  IGFBP-2 heparin binding domain-containing peptide sequence
RRRVGVENPKR

SEQ ID NO: 1705 - protein, 11 aa, Artificial
  IGFBP-2 heparin binding domain-containing peptide sequence
HRRVGVENPKR

SEQ ID NO: 1706 - protein, 11 aa, Artificial
  IGFBP-2 heparin binding domain-containing peptide sequence
KHHLGLNNPKR

SEQ ID NO: 1707 - protein, 11 aa, Artificial
  IGFBP-2 heparin binding domain-containing peptide sequence
RHHLGLNNPKR

SEQ ID NO: 1708 - protein, 11 aa, Artificial
  IGFBP-2 heparin binding domain-containing peptide sequence
HHHLGLNNPKR

SEQ ID NO: 1709 - protein, 11 aa, Artificial
  IGFBP-2 heparin binding domain-containing peptide sequence
KKHLGLNNPKR

SEQ ID NO: 1710 - protein, 11 aa, Artificial
  IGFBP-2 heparin binding domain-containing peptide sequence
RKHLGLNNPKR

SEQ ID NO: 1711 - protein, 11 aa, Artificial
  IGFBP-2 heparin binding domain-containing peptide sequence
HKHLGLNNPKR

SEQ ID NO: 1712 - protein, 11 aa, Artificial
  IGFBP-2 heparin binding domain-containing peptide sequence
KRHLGLNNPKR

SEQ ID NO: 1713 - protein, 11 aa, Artificial
  IGFBP-2 heparin binding domain-containing peptide sequence
RRHLGLNNPKR

SEQ ID NO: 1714 - protein, 11 aa, Artificial
  IGFBP-2 heparin binding domain-containing peptide sequence
HRHLGLNNPKR

SEQ ID NO: 1715 - protein, 11 aa, Artificial
  IGFBP-2 heparin binding domain-containing peptide sequence
KHKLGLNNPKR

SEQ ID NO: 1716 - protein, 11 aa, Artificial
  IGFBP-2 heparin binding domain-containing peptide sequence
RHKLGLNNPKR

SEQ ID NO: 1717 - protein, 11 aa, Artificial
  IGFBP-2 heparin binding domain-containing peptide sequence
HHKLGLNNPKR

SEQ ID NO: 1718 - protein, 11 aa, Artificial
  IGFBP-2 heparin binding domain-containing peptide sequence
KKKLGLNNPKR

SEQ ID NO: 1719 - protein, 11 aa, Artificial
  IGFBP-2 heparin binding domain-containing peptide sequence
RKKLGLNNPKR

SEQ ID NO: 1720 - protein, 11 aa, Artificial
  IGFBP-2 heparin binding domain-containing peptide sequence
HKKLGLNNPKR

SEQ ID NO: 1721 - protein, 11 aa, Artificial
  IGFBP-2 heparin binding domain-containing peptide sequence
KRKLGLNNPKR

SEQ ID NO: 1722 - protein, 11 aa, Artificial
  IGFBP-2 heparin binding domain-containing peptide sequence
RRKLGLNNPKR

SEQ ID NO: 1723 - protein, 11 aa, Artificial
  IGFBP-2 heparin binding domain-containing peptide sequence
HRKLGLNNPKR

SEQ ID NO: 1724 - protein, 11 aa, Artificial
  IGFBP-2 heparin binding domain-containing peptide sequence
KHRLGLNNPKR

SEQ ID NO: 1725 - protein, 11 aa, Artificial
  IGFBP-2 heparin binding domain-containing peptide sequence
RHRLGLNNPKR

SEQ ID NO: 1726 - protein, 11 aa, Artificial
  IGFBP-2 heparin binding domain-containing peptide sequence
HHRLGLNNPKR

SEQ ID NO: 1727 - protein, 11 aa, Artificial
  IGFBP-2 heparin binding domain-containing peptide sequence
KKRLGLNNPKR

SEQ ID NO: 1728 - protein, 11 aa, Artificial
  IGFBP-2 heparin binding domain-containing peptide sequence
RKRLGLNNPKR

SEQ ID NO: 1729 - protein, 11 aa, Artificial
  IGFBP-2 heparin binding domain-containing peptide sequence
HKRLGLNNPKR

SEQ ID NO: 1730 - protein, 11 aa, Artificial
  IGFBP-2 heparin binding domain-containing peptide sequence
KRRLGLNNPKR

SEQ ID NO: 1731 - protein, 11 aa, Artificial
  IGFBP-2 heparin binding domain-containing peptide sequence
RRRLGLNNPKR

SEQ ID NO: 1732 - protein, 11 aa, Artificial
  IGFBP-2 heparin binding domain-containing peptide sequence
HRRLGLNNPKR

SEQ ID NO: 1733 - protein, 11 aa, Artificial
  IGFBP-2 heparin binding domain-containing peptide sequence
KHHIGLNNPKR

SEQ ID NO: 1734 - protein, 11 aa, Artificial
  IGFBP-2 heparin binding domain-containing peptide sequence
RHHIGLNNPKR

SEQ ID NO: 1735 - protein, 11 aa, Artificial
  IGFBP-2 heparin binding domain-containing peptide sequence
HHHIGLNNPKR

SEQ ID NO: 1736 - protein, 11 aa, Artificial
  IGFBP-2 heparin binding domain-containing peptide sequence
KKHIGLNNPKR

SEQ ID NO: 1737 - protein, 11 aa, Artificial
  IGFBP-2 heparin binding domain-containing peptide sequence
RKHIGLNNPKR

SEQ ID NO: 1738 - protein, 11 aa, Artificial
  IGFBP-2 heparin binding domain-containing peptide sequence
HKHIGLNNPKR

SEQ ID NO: 1739 - protein, 11 aa, Artificial
  IGFBP-2 heparin binding domain-containing peptide sequence
KRHIGLNNPKR

SEQ ID NO: 1740 - protein, 11 aa, Artificial
  IGFBP-2 heparin binding domain-containing peptide sequence
RRHIGLNNPKR

SEQ ID NO: 1741 - protein, 11 aa, Artificial
  IGFBP-2 heparin binding domain-containing peptide sequence
HRHIGLNNPKR

SEQ ID NO: 1742 - protein, 11 aa, Artificial
  IGFBP-2 heparin binding domain-containing peptide sequence
KHKIGLNNPKR

SEQ ID NO: 1743 - protein, 11 aa, Artificial
  IGFBP-2 heparin binding domain-containing peptide sequence
RHKIGLNNPKR

SEQ ID NO: 1744 - protein, 11 aa, Artificial
  IGFBP-2 heparin binding domain-containing peptide sequence
HHKIGLNNPKR

SEQ ID NO: 1745 - protein, 11 aa, Artificial
  IGFBP-2 heparin binding domain-containing peptide sequence
KKKIGLNNPKR

SEQ ID NO: 1746 - protein, 11 aa, Artificial
  IGFBP-2 heparin binding domain-containing peptide sequence
RKKIGLNNPKR

SEQ ID NO: 1747 - protein, 11 aa, Artificial
  IGFBP-2 heparin binding domain-containing peptide sequence
HKKIGLNNPKR

SEQ ID NO: 1748 - protein, 11 aa, Artificial
  IGFBP-2 heparin binding domain-containing peptide sequence
KRKIGLNNPKR

SEQ ID NO: 1749 - protein, 11 aa, Artificial
  IGFBP-2 heparin binding domain-containing peptide sequence
RRKIGLNNPKR

SEQ ID NO: 1750 - protein, 11 aa, Artificial
  IGFBP-2 heparin binding domain-containing peptide sequence
HRKIGLNNPKR

SEQ ID NO: 1751 - protein, 11 aa, Artificial
  IGFBP-2 heparin binding domain-containing peptide sequence
KHRIGLNNPKR

SEQ ID NO: 1752 - protein, 11 aa, Artificial
  IGFBP-2 heparin binding domain-containing peptide sequence
RHRIGLNNPKR

SEQ ID NO: 1753 - protein, 11 aa, Artificial
  IGFBP-2 heparin binding domain-containing peptide sequence
HHRIGLNNPKR

SEQ ID NO: 1754 - protein, 11 aa, Artificial
  IGFBP-2 heparin binding domain-containing peptide sequence
KKRIGLNNPKR

SEQ ID NO: 1755 - protein, 11 aa, Artificial
  IGFBP-2 heparin binding domain-containing peptide sequence
RKRIGLNNPKR

SEQ ID NO: 1756 - protein, 11 aa, Artificial
  IGFBP-2 heparin binding domain-containing peptide sequence
HKRIGLNNPKR

SEQ ID NO: 1757 - protein, 11 aa, Artificial
  IGFBP-2 heparin binding domain-containing peptide sequence
KRRIGLNNPKR

SEQ ID NO: 1758 - protein, 11 aa, Artificial
  IGFBP-2 heparin binding domain-containing peptide sequence
RRRIGLNNPKR

SEQ ID NO: 1759 - protein, 11 aa, Artificial
  IGFBP-2 heparin binding domain-containing peptide sequence
HRRIGLNNPKR

SEQ ID NO: 1760 - protein, 11 aa, Artificial
  IGFBP-2 heparin binding domain-containing peptide sequence
KHHVGLNNPKR

SEQ ID NO: 1761 - protein, 11 aa, Artificial
  IGFBP-2 heparin binding domain-containing peptide sequence
RHHVGLNNPKR

SEQ ID NO: 1762 - protein, 11 aa, Artificial
  IGFBP-2 heparin binding domain-containing peptide sequence
HHHVGLNNPKR

SEQ ID NO: 1763 - protein, 11 aa, Artificial
  IGFBP-2 heparin binding domain-containing peptide sequence
KKHVGLNNPKR

SEQ ID NO: 1764 - protein, 11 aa, Artificial
  IGFBP-2 heparin binding domain-containing peptide sequence
RKHVGLNNPKR

SEQ ID NO: 1765 - protein, 11 aa, Artificial
  IGFBP-2 heparin binding domain-containing peptide sequence
HKHVGLNNPKR

SEQ ID NO: 1766 - protein, 11 aa, Artificial
  IGFBP-2 heparin binding domain-containing peptide sequence
KRHVGLNNPKR

SEQ ID NO: 1767 - protein, 11 aa, Artificial
  IGFBP-2 heparin binding domain-containing peptide sequence
RRHVGLNNPKR

SEQ ID NO: 1768 - protein, 11 aa, Artificial
  IGFBP-2 heparin binding domain-containing peptide sequence
HRHVGLNNPKR

SEQ ID NO: 1769 - protein, 11 aa, Artificial
  IGFBP-2 heparin binding domain-containing peptide sequence
KHKVGLNNPKR

SEQ ID NO: 1770 - protein, 11 aa, Artificial
  IGFBP-2 heparin binding domain-containing peptide sequence
RHKVGLNNPKR

SEQ ID NO: 1771 - protein, 11 aa, Artificial
  IGFBP-2 heparin binding domain-containing peptide sequence
HHKVGLNNPKR

SEQ ID NO: 1772 - protein, 11 aa, Artificial
  IGFBP-2 heparin binding domain-containing peptide sequence
KKKVGLNNPKR

SEQ ID NO: 1773 - protein, 11 aa, Artificial
  IGFBP-2 heparin binding domain-containing peptide sequence
RKKVGLNNPKR

SEQ ID NO: 1774 - protein, 11 aa, Artificial
  IGFBP-2 heparin binding domain-containing peptide sequence
HKKVGLNNPKR

SEQ ID NO: 1775 - protein, 11 aa, Artificial
  IGFBP-2 heparin binding domain-containing peptide sequence
KRKVGLNNPKR

SEQ ID NO: 1776 - protein, 11 aa, Artificial
  IGFBP-2 heparin binding domain-containing peptide sequence
RRKVGLNNPKR

SEQ ID NO: 1777 - protein, 11 aa, Artificial
  IGFBP-2 heparin binding domain-containing peptide sequence
HRKVGLNNPKR

SEQ ID NO: 1778 - protein, 11 aa, Artificial
  IGFBP-2 heparin binding domain-containing peptide sequence
KHRVGLNNPKR

SEQ ID NO: 1779 - protein, 11 aa, Artificial
  IGFBP-2 heparin binding domain-containing peptide sequence
RHRVGLNNPKR

SEQ ID NO: 1780 - protein, 11 aa, Artificial
  IGFBP-2 heparin binding domain-containing peptide sequence
HHRVGLNNPKR

SEQ ID NO: 1781 - protein, 11 aa, Artificial
  IGFBP-2 heparin binding domain-containing peptide sequence
KKRVGLNNPKR

SEQ ID NO: 1782 - protein, 11 aa, Artificial
  IGFBP-2 heparin binding domain-containing peptide sequence
RKRVGLNNPKR

SEQ ID NO: 1783 - protein, 11 aa, Artificial
  IGFBP-2 heparin binding domain-containing peptide sequence
HKRVGLNNPKR

SEQ ID NO: 1784 - protein, 11 aa, Artificial
  IGFBP-2 heparin binding domain-containing peptide sequence
KRRVGLNNPKR

SEQ ID NO: 1785 - protein, 11 aa, Artificial
  IGFBP-2 heparin binding domain-containing peptide sequence
RRRVGLNNPKR

SEQ ID NO: 1786 - protein, 11 aa, Artificial
  IGFBP-2 heparin binding domain-containing peptide sequence
HRRVGLNNPKR

SEQ ID NO: 1787 - protein, 11 aa, Artificial
  IGFBP-2 heparin binding domain-containing peptide sequence
KHHLGINNPKR

SEQ ID NO: 1788 - protein, 11 aa, Artificial
  IGFBP-2 heparin binding domain-containing peptide sequence
RHHLGINNPKR

SEQ ID NO: 1789 - protein, 11 aa, Artificial
  IGFBP-2 heparin binding domain-containing peptide sequence
HHHLGINNPKR

SEQ ID NO: 1790 - protein, 11 aa, Artificial
  IGFBP-2 heparin binding domain-containing peptide sequence
KKHLGINNPKR

SEQ ID NO: 1791 - protein, 11 aa, Artificial
  IGFBP-2 heparin binding domain-containing peptide sequence
RKHLGINNPKR

SEQ ID NO: 1792 - protein, 11 aa, Artificial
  IGFBP-2 heparin binding domain-containing peptide sequence
HKHLGINNPKR

SEQ ID NO: 1793 - protein, 11 aa, Artificial
  IGFBP-2 heparin binding domain-containing peptide sequence
KRHLGINNPKR

SEQ ID NO: 1794 - protein, 11 aa, Artificial
  IGFBP-2 heparin binding domain-containing peptide sequence
RRHLGINNPKR

SEQ ID NO: 1795 - protein, 11 aa, Artificial
  IGFBP-2 heparin binding domain-containing peptide sequence
HRHLGINNPKR

SEQ ID NO: 1796 - protein, 11 aa, Artificial
  IGFBP-2 heparin binding domain-containing peptide sequence
KHKLGINNPKR

SEQ ID NO: 1797 - protein, 11 aa, Artificial
  IGFBP-2 heparin binding domain-containing peptide sequence
RHKLGINNPKR

SEQ ID NO: 1798 - protein, 11 aa, Artificial
  IGFBP-2 heparin binding domain-containing peptide sequence
HHKLGINNPKR

SEQ ID NO: 1799 - protein, 11 aa, Artificial
  IGFBP-2 heparin binding domain-containing peptide sequence
KKKLGINNPKR

SEQ ID NO: 1800 - protein, 11 aa, Artificial
  IGFBP-2 heparin binding domain-containing peptide sequence
RKKLGINNPKR

SEQ ID NO: 1801 - protein, 11 aa, Artificial
  IGFBP-2 heparin binding domain-containing peptide sequence
HKKLGINNPKR

SEQ ID NO: 1802 - protein, 11 aa, Artificial
  IGFBP-2 heparin binding domain-containing peptide sequence
KRKLGINNPKR

SEQ ID NO: 1803 - protein, 11 aa, Artificial
  IGFBP-2 heparin binding domain-containing peptide sequence
RRKLGINNPKR

SEQ ID NO: 1804 - protein, 11 aa, Artificial
  IGFBP-2 heparin binding domain-containing peptide sequence
HRKLGINNPKR

SEQ ID NO: 1805 - protein, 11 aa, Artificial
  IGFBP-2 heparin binding domain-containing peptide sequence
KHRLGINNPKR

SEQ ID NO: 1806 - protein, 11 aa, Artificial
  IGFBP-2 heparin binding domain-containing peptide sequence
RHRLGINNPKR

SEQ ID NO: 1807 - protein, 11 aa, Artificial
  IGFBP-2 heparin binding domain-containing peptide sequence
HHRLGINNPKR

SEQ ID NO: 1808 - protein, 11 aa, Artificial
  IGFBP-2 heparin binding domain-containing peptide sequence
KKRLGINNPKR

SEQ ID NO: 1809 - protein, 11 aa, Artificial
  IGFBP-2 heparin binding domain-containing peptide sequence
RKRLGINNPKR

SEQ ID NO: 1810 - protein, 11 aa, Artificial
  IGFBP-2 heparin binding domain-containing peptide sequence
HKRLGINNPKR

SEQ ID NO: 1811 - protein, 11 aa, Artificial
  IGFBP-2 heparin binding domain-containing peptide sequence
KRRLGINNPKR

SEQ ID NO: 1812 - protein, 11 aa, Artificial
  IGFBP-2 heparin binding domain-containing peptide sequence
RRRLGINNPKR

SEQ ID NO: 1813 - protein, 11 aa, Artificial
  IGFBP-2 heparin binding domain-containing peptide sequence
HRRLGINNPKR

SEQ ID NO: 1814 - protein, 11 aa, Artificial
  IGFBP-2 heparin binding domain-containing peptide sequence
KHHIGIENPKR

SEQ ID NO: 1815 - protein, 11 aa, Artificial
  IGFBP-2 heparin binding domain-containing peptide sequence
RHHIGINNPKR

SEQ ID NO: 1816 - protein, 11 aa, Artificial
  IGFBP-2 heparin binding domain-containing peptide sequence
HHHIGINNPKR

SEQ ID NO: 1817 - protein, 11 aa, Artificial
  IGFBP-2 heparin binding domain-containing peptide sequence
KKHIGINNPKR

SEQ ID NO: 1818 - protein, 11 aa, Artificial
  IGFBP-2 heparin binding domain-containing peptide sequence
RKHIGINNPKR

SEQ ID NO: 1819 - protein, 11 aa, Artificial
  IGFBP-2 heparin binding domain-containing peptide sequence
HKHIGINNPKR

SEQ ID NO: 1820 - protein, 11 aa, Artificial
  IGFBP-2 heparin binding domain-containing peptide sequence
KRHIGINNPKR

SEQ ID NO: 1821 - protein, 11 aa, Artificial
  IGFBP-2 heparin binding domain-containing peptide sequence
RRHIGINNPKR

SEQ ID NO: 1822 - protein, 11 aa, Artificial
  IGFBP-2 heparin binding domain-containing peptide sequence
HRHIGINNPKR

SEQ ID NO: 1823 - protein, 11 aa, Artificial
  IGFBP-2 heparin binding domain-containing peptide sequence
KHKIGINNPKR

SEQ ID NO: 1824 - protein, 11 aa, Artificial
  IGFBP-2 heparin binding domain-containing peptide sequence
RHKIGINNPKR

SEQ ID NO: 1825 - protein, 11 aa, Artificial
  IGFBP-2 heparin binding domain-containing peptide sequence
HHKIGINNPKR

SEQ ID NO: 1826 - protein, 11 aa, Artificial
  IGFBP-2 heparin binding domain-containing peptide sequence
KKKIGINNPKR

SEQ ID NO: 1827 - protein, 11 aa, Artificial
  IGFBP-2 heparin binding domain-containing peptide sequence
RKKIGINNPKR

SEQ ID NO: 1828 - protein, 11 aa, Artificial
  IGFBP-2 heparin binding domain-containing peptide sequence
HKKIGINNPKR

SEQ ID NO: 1829 - protein, 11 aa, Artificial
  IGFBP-2 heparin binding domain-containing peptide sequence
KRKIGINNPKR

SEQ ID NO: 1830 - protein, 11 aa, Artificial
  IGFBP-2 heparin binding domain-containing peptide sequence
RRKIGINNPKR

SEQ ID NO: 1831 - protein, 11 aa, Artificial
  IGFBP-2 heparin binding domain-containing peptide sequence
HRKIGINNPKR

SEQ ID NO: 1832 - protein, 11 aa, Artificial
  IGFBP-2 heparin binding domain-containing peptide sequence
KHRIGINNPKR

SEQ ID NO: 1833 - protein, 11 aa, Artificial
  IGFBP-2 heparin binding domain-containing peptide sequence
RHRIGINNPKR

SEQ ID NO: 1834 - protein, 11 aa, Artificial
  IGFBP-2 heparin binding domain-containing peptide sequence
HHRIGINNPKR

SEQ ID NO: 1835 - protein, 11 aa, Artificial
  IGFBP-2 heparin binding domain-containing peptide sequence
KKRIGINNPKR

SEQ ID NO: 1836 - protein, 11 aa, Artificial
  IGFBP-2 heparin binding domain-containing peptide sequence
RKRIGINNPKR

SEQ ID NO: 1837 - protein, 11 aa, Artificial
  IGFBP-2 heparin binding domain-containing peptide sequence
HKRIGINNPKR

SEQ ID NO: 1838 - protein, 11 aa, Artificial
  IGFBP-2 heparin binding domain-containing peptide sequence
KRRIGINNPKR

SEQ ID NO: 1839 - protein, 11 aa, Artificial
  IGFBP-2 heparin binding domain-containing peptide sequence
RRRIGINNPKR

SEQ ID NO: 1840 - protein, 11 aa, Artificial
  IGFBP-2 heparin binding domain-containing peptide sequence
HRRIGINNPKR

SEQ ID NO: 1841 - protein, 11 aa, Artificial
  IGFBP-2 heparin binding domain-containing peptide sequence
KHHVGINNPKR

SEQ ID NO: 1842 - protein, 11 aa, Artificial
  IGFBP-2 heparin binding domain-containing peptide sequence
RHHVGINNPKR

SEQ ID NO: 1843 - protein, 11 aa, Artificial
  IGFBP-2 heparin binding domain-containing peptide sequence
HHHVGINNPKR

SEQ ID NO: 1844 - protein, 11 aa, Artificial
  IGFBP-2 heparin binding domain-containing peptide sequence
KKHVGINNPKR

SEQ ID NO: 1845 - protein, 11 aa, Artificial
  IGFBP-2 heparin binding domain-containing peptide sequence
RKHVGINNPKR

SEQ ID NO: 1846 - protein, 11 aa, Artificial
  IGFBP-2 heparin binding domain-containing peptide sequence
HKHVGINNPKR

SEQ ID NO: 1847 - protein, 11 aa, Artificial
  IGFBP-2 heparin binding domain-containing peptide sequence
KRHVGINNPKR

SEQ ID NO: 1848 - protein, 11 aa, Artificial
  IGFBP-2 heparin binding domain-containing peptide sequence
RRHVGINNPKR

SEQ ID NO: 1849 - protein, 11 aa, Artificial
  IGFBP-2 heparin binding domain-containing peptide sequence
HRHVGINNPKR

SEQ ID NO: 1850 - protein, 11 aa, Artificial
  IGFBP-2 heparin binding domain-containing peptide sequence
KHKVGINNPKR

SEQ ID NO: 1851 - protein, 11 aa, Artificial
  IGFBP-2 heparin binding domain-containing peptide sequence
RHKVGINNPKR

SEQ ID NO: 1852 - protein, 11 aa, Artificial
  IGFBP-2 heparin binding domain-containing peptide sequence
HHKVGINNPKR

SEQ ID NO: 1853 - protein, 11 aa, Artificial
  IGFBP-2 heparin binding domain-containing peptide sequence
KKKVGINNPKR

SEQ ID NO: 1854 - protein, 11 aa, Artificial
  IGFBP-2 heparin binding domain-containing peptide sequence
RKKVGINNPKR

SEQ ID NO: 1855 - protein, 11 aa, Artificial
  IGFBP-2 heparin binding domain-containing peptide sequence
HKKVGINNPKR

SEQ ID NO: 1856 - protein, 11 aa, Artificial
  IGFBP-2 heparin binding domain-containing peptide sequence
KRKVGINNPKR

SEQ ID NO: 1857 - protein, 11 aa, Artificial
  IGFBP-2 heparin binding domain-containing peptide sequence
RRKVGINNPKR

SEQ ID NO: 1858 - protein, 11 aa, Artificial
  IGFBP-2 heparin binding domain-containing peptide sequence
HRKVGINNPKR

SEQ ID NO: 1859 - protein, 11 aa, Artificial
  IGFBP-2 heparin binding domain-containing peptide sequence
KHRVGINNPKR

SEQ ID NO: 1860 - protein, 11 aa, Artificial
  IGFBP-2 heparin binding domain-containing peptide sequence
RHRVGINNPKR

SEQ ID NO: 1861 - protein, 11 aa, Artificial
  IGFBP-2 heparin binding domain-containing peptide sequence
HHRVGINNPKR

SEQ ID NO: 1862 - protein, 11 aa, Artificial
  IGFBP-2 heparin binding domain-containing peptide sequence
KKRVGINNPKR

SEQ ID NO: 1863 - protein, 11 aa, Artificial
  IGFBP-2 heparin binding domain-containing peptide sequence
RKRVGINNPKR

SEQ ID NO: 1864 - protein, 11 aa, Artificial
  IGFBP-2 heparin binding domain-containing peptide sequence
HKRVGINNPKR

SEQ ID NO: 1865 - protein, 11 aa, Artificial
  IGFBP-2 heparin binding domain-containing peptide sequence
KRRVGINNPKR

SEQ ID NO: 1866 - protein, 11 aa, Artificial
  IGFBP-2 heparin binding domain-containing peptide sequence
RRRVGINNPKR

SEQ ID NO: 1867 - protein, 11 aa, Artificial
  IGFBP-2 heparin binding domain-containing peptide sequence
HRRVGINNPKR

SEQ ID NO: 1868 - protein, 11 aa, Artificial
  IGFBP-2 heparin binding domain-containing peptide sequence
KHHLGVNNPKR

SEQ ID NO: 1869 - protein, 11 aa, Artificial
  IGFBP-2 heparin binding domain-containing peptide sequence
RHHLGVNNPKR

SEQ ID NO: 1870 - protein, 11 aa, Artificial
  IGFBP-2 heparin binding domain-containing peptide sequence
HHHLGVNNPKR

SEQ ID NO: 1871 - protein, 11 aa, Artificial
  IGFBP-2 heparin binding domain-containing peptide sequence
KKHLGVNNPKR

SEQ ID NO: 1872 - protein, 11 aa, Artificial
  IGFBP-2 heparin binding domain-containing peptide sequence
RKHLGVNNPKR

SEQ ID NO: 1873 - protein, 11 aa, Artificial
  IGFBP-2 heparin binding domain-containing peptide sequence
HKHLGVNNPKR

SEQ ID NO: 1874 - protein, 11 aa, Artificial
  IGFBP-2 heparin binding domain-containing peptide sequence
KRHLGVNNPKR

SEQ ID NO: 1875 - protein, 11 aa, Artificial
  IGFBP-2 heparin binding domain-containing peptide sequence
RRHLGVNNPKR

SEQ ID NO: 1876 - protein, 11 aa, Artificial
  IGFBP-2 heparin binding domain-containing peptide sequence
HRHLGVNNPKR

SEQ ID NO: 1877 - protein, 11 aa, Artificial
  IGFBP-2 heparin binding domain-containing peptide sequence
KHKLGVNNPKR

SEQ ID NO: 1878 - protein, 11 aa, Artificial
  IGFBP-2 heparin binding domain-containing peptide sequence
RHKLGVNNPKR

SEQ ID NO: 1879 - protein, 11 aa, Artificial
  IGFBP-2 heparin binding domain-containing peptide sequence
HHKLGVNNPKR

SEQ ID NO: 1880 - protein, 11 aa, Artificial
  IGFBP-2 heparin binding domain-containing peptide sequence
KKKLGVNNPKR

SEQ ID NO: 1881 - protein, 11 aa, Artificial
  IGFBP-2 heparin binding domain-containing peptide sequence
RKKLGVNNPKR

SEQ ID NO: 1882 - protein, 11 aa, Artificial
  IGFBP-2 heparin binding domain-containing peptide sequence
HKKLGVNNPKR

SEQ ID NO: 1883 - protein, 11 aa, Artificial
  IGFBP-2 heparin binding domain-containing peptide sequence
KRKLGVNNPKR

SEQ ID NO: 1884 - protein, 11 aa, Artificial
  IGFBP-2 heparin binding domain-containing peptide sequence
RRKLGVNNPKR

SEQ ID NO: 1885 - protein, 11 aa, Artificial
  IGFBP-2 heparin binding domain-containing peptide sequence
HRKLGVNNPKR

SEQ ID NO: 1886 - protein, 11 aa, Artificial
  IGFBP-2 heparin binding domain-containing peptide sequence
KHRLGVNNPKR

SEQ ID NO: 1887 - protein, 11 aa, Artificial
  IGFBP-2 heparin binding domain-containing peptide sequence
RHRLGVNNPKR

SEQ ID NO: 1888 - protein, 11 aa, Artificial
  IGFBP-2 heparin binding domain-containing peptide sequence
HHRLGVNNPKR

SEQ ID NO: 1889 - protein, 11 aa, Artificial
  IGFBP-2 heparin binding domain-containing peptide sequence
KKRLGVNNPKR

SEQ ID NO: 1890 - protein, 11 aa, Artificial
  IGFBP-2 heparin binding domain-containing peptide sequence
RKRLGVNNPKR

SEQ ID NO: 1891 - protein, 11 aa, Artificial
  IGFBP-2 heparin binding domain-containing peptide sequence
HKRLGVNNPKR

SEQ ID NO: 1892 - protein, 11 aa, Artificial
  IGFBP-2 heparin binding domain-containing peptide sequence
KRRLGVNNPKR

SEQ ID NO: 1893 - protein, 11 aa, Artificial
  IGFBP-2 heparin binding domain-containing peptide sequence
RRRLGVNNPKR

SEQ ID NO: 1894 - protein, 11 aa, Artificial
  IGFBP-2 heparin binding domain-containing peptide sequence
HRRLGVNNPKR

SEQ ID NO: 1895 - protein, 11 aa, Artificial
  IGFBP-2 heparin binding domain-containing peptide sequence
KHHIGVNNPKR

SEQ ID NO: 1896 - protein, 11 aa, Artificial
  IGFBP-2 heparin binding domain-containing peptide sequence
RHHIGVNNPKR

SEQ ID NO: 1897 - protein, 11 aa, Artificial
  IGFBP-2 heparin binding domain-containing peptide sequence
HHHIGVNNPKR

SEQ ID NO: 1898 - protein, 11 aa, Artificial
  IGFBP-2 heparin binding domain-containing peptide sequence
KKHIGVNNPKR

SEQ ID NO: 1899 - protein, 11 aa, Artificial
  IGFBP-2 heparin binding domain-containing peptide sequence
RKHIGVNNPKR

SEQ ID NO: 1900 - protein, 11 aa, Artificial
  IGFBP-2 heparin binding domain-containing peptide sequence
HKHIGVNNPKR

SEQ ID NO: 1901 - protein, 11 aa, Artificial
  IGFBP-2 heparin binding domain-containing peptide sequence
KRHIGVNNPKR

SEQ ID NO: 1902 - protein, 11 aa, Artificial
  IGFBP-2 heparin binding domain-containing peptide sequence
RRHIGVNNPKR

SEQ ID NO: 1903 - protein, 11 aa, Artificial
  IGFBP-2 heparin binding domain-containing peptide sequence
HRHIGVNNPKR

SEQ ID NO: 1904 - protein, 11 aa, Artificial
  IGFBP-2 heparin binding domain-containing peptide sequence
KHKIGVNNPKR

SEQ ID NO: 1905 - protein, 11 aa, Artificial
  IGFBP-2 heparin binding domain-containing peptide sequence
RHKIGVNNPKR

SEQ ID NO: 1906 - protein, 11 aa, Artificial
  IGFBP-2 heparin binding domain-containing peptide sequence
HHKIGVNNPKR

SEQ ID NO: 1907 - protein, 11 aa, Artificial
  IGFBP-2 heparin binding domain-containing peptide sequence
KKKIGVNNPKR

SEQ ID NO: 1908 - protein, 11 aa, Artificial
  IGFBP-2 heparin binding domain-containing peptide sequence
RKKIGVNNPKR

SEQ ID NO: 1909 - protein, 11 aa, Artificial
  IGFBP-2 heparin binding domain-containing peptide sequence
HKKIGVNNPKR

SEQ ID NO: 1910 - protein, 11 aa, Artificial
  IGFBP-2 heparin binding domain-containing peptide sequence
KRKIGVNNPKR

SEQ ID NO: 1911 - protein, 11 aa, Artificial
  IGFBP-2 heparin binding domain-containing peptide sequence
RRKIGVNNPKR

SEQ ID NO: 1912 - protein, 11 aa, Artificial
  IGFBP-2 heparin binding domain-containing peptide sequence
HRKIGVNNPKR

SEQ ID NO: 1913 - protein, 11 aa, Artificial
  IGFBP-2 heparin binding domain-containing peptide sequence
KHRIGVNNPKR

SEQ ID NO: 1914 - protein, 11 aa, Artificial
  IGFBP-2 heparin binding domain-containing peptide sequence
RHRIGVNNPKR

SEQ ID NO: 1915 - protein, 11 aa, Artificial
  IGFBP-2 heparin binding domain-containing peptide sequence
HHRIGVNNPKR

SEQ ID NO: 1916 - protein, 11 aa, Artificial
  IGFBP-2 heparin binding domain-containing peptide sequence
KKRIGVNNPKR

SEQ ID NO: 1917 - protein, 11 aa, Artificial
  IGFBP-2 heparin binding domain-containing peptide sequence
RKRIGVNNPKR

SEQ ID NO: 1918 - protein, 11 aa, Artificial
  IGFBP-2 heparin binding domain-containing peptide sequence
HKRIGVNNPKR

SEQ ID NO: 1919 - protein, 11 aa, Artificial
  IGFBP-2 heparin binding domain-containing peptide sequence
KRRIGVNNPKR

SEQ ID NO: 1920 - protein, 11 aa, Artificial
  IGFBP-2 heparin binding domain-containing peptide sequence
RRRIGVNNPKR

SEQ ID NO: 1921 - protein, 11 aa, Artificial
  IGFBP-2 heparin binding domain-containing peptide sequence
HRRIGVNNPKR

SEQ ID NO: 1922 - protein, 11 aa, Artificial
  IGFBP-2 heparin binding domain-containing peptide sequence
KHHVGVNNPKR

SEQ ID NO: 1923 - protein, 11 aa, Artificial
  IGFBP-2 heparin binding domain-containing peptide sequence
RHHVGVNNPKR

SEQ ID NO: 1924 - protein, 11 aa, Artificial
  IGFBP-2 heparin binding domain-containing peptide sequence
HHHVGVNNPKR

SEQ ID NO: 1925 - protein, 11 aa, Artificial
  IGFBP-2 heparin binding domain-containing peptide sequence
KKHVGVNNPKR

SEQ ID NO: 1926 - protein, 11 aa, Artificial
  IGFBP-2 heparin binding domain-containing peptide sequence
RKHVGVNNPKR

SEQ ID NO: 1927 - protein, 11 aa, Artificial
  IGFBP-2 heparin binding domain-containing peptide sequence
HKHVGVNNPKR

SEQ ID NO: 1928 - protein, 11 aa, Artificial
  IGFBP-2 heparin binding domain-containing peptide sequence
KRHVGVNNPKR

SEQ ID NO: 1929 - protein, 11 aa, Artificial
  IGFBP-2 heparin binding domain-containing peptide sequence
RRHVGVNNPKR

SEQ ID NO: 1930 - protein, 11 aa, Artificial
  IGFBP-2 heparin binding domain-containing peptide sequence
HRHVGVNNPKR

SEQ ID NO: 1931 - protein, 11 aa, Artificial
  IGFBP-2 heparin binding domain-containing peptide sequence
KHKVGVNNPKR

SEQ ID NO: 1932 - protein, 11 aa, Artificial
  IGFBP-2 heparin binding domain-containing peptide sequence
RHKVGVNNPKR

SEQ ID NO: 1933 - protein, 11 aa, Artificial
  IGFBP-2 heparin binding domain-containing peptide sequence
HHKVGVNNPKR

SEQ ID NO: 1934 - protein, 11 aa, Artificial
  IGFBP-2 heparin binding domain-containing peptide sequence
KKKVGVNNPKR

SEQ ID NO: 1935 - protein, 11 aa, Artificial
  IGFBP-2 heparin binding domain-containing peptide sequence
RKKVGVNNPKR

SEQ ID NO: 1936 - protein, 11 aa, Artificial
  IGFBP-2 heparin binding domain-containing peptide sequence
HKKVGVNNPKR

SEQ ID NO: 1937 - protein, 11 aa, Artificial
  IGFBP-2 heparin binding domain-containing peptide sequence
KRKVGVNNPKR

SEQ ID NO: 1938 - protein, 11 aa, Artificial
  IGFBP-2 heparin binding domain-containing peptide sequence
RRKVGVNNPKR

SEQ ID NO: 1939 - protein, 11 aa, Artificial
  IGFBP-2 heparin binding domain-containing peptide sequence
HRKVGVNNPKR

SEQ ID NO: 1940 - protein, 11 aa, Artificial
  IGFBP-2 heparin binding domain-containing peptide sequence
KHRVGVNNPKR

SEQ ID NO: 1941 - protein, 11 aa, Artificial
  IGFBP-2 heparin binding domain-containing peptide sequence
RHRVGVNNPKR

SEQ ID NO: 1942 - protein, 11 aa, Artificial
  IGFBP-2 heparin binding domain-containing peptide sequence
HHRVGVNNPKR

SEQ ID NO: 1943 - protein, 11 aa, Artificial
  IGFBP-2 heparin binding domain-containing peptide sequence
KKRVGVNNPKR

SEQ ID NO: 1944 - protein, 11 aa, Artificial
  IGFBP-2 heparin binding domain-containing peptide sequence
RKRVGVNNPKR

SEQ ID NO: 1945 - protein, 11 aa, Artificial
  IGFBP-2 heparin binding domain-containing peptide sequence
HKRVGVNNPKR

SEQ ID NO: 1946 - protein, 11 aa, Artificial
  IGFBP-2 heparin binding domain-containing peptide sequence
KRRVGVNNPKR

SEQ ID NO: 1947 - protein, 11 aa, Artificial
  IGFBP-2 heparin binding domain-containing peptide sequence
RRRVGVNNPKR

SEQ ID NO: 1948 - protein, 11 aa, Artificial
  IGFBP-2 heparin binding domain-containing peptide sequence
HRRVGVNNPKR

SEQ ID NO: 1949 - protein, 11 aa, Artificial
  IGFBP-2 heparin binding domain-containing peptide sequence
KHHLGLEEPKH

SEQ ID NO: 1950 - protein, 11 aa, Artificial
  IGFBP-2 heparin binding domain-containing peptide sequence
RHHLGLEEPKH

SEQ ID NO: 1951 - protein, 11 aa, Artificial
  IGFBP-2 heparin binding domain-containing peptide sequence
HHHLGLEEPKH

SEQ ID NO: 1952 - protein, 11 aa, Artificial
  IGFBP-2 heparin binding domain-containing peptide sequence
KKHLGLEEPKH

SEQ ID NO: 1953 - protein, 11 aa, Artificial
  IGFBP-2 heparin binding domain-containing peptide sequence
RKHLGLEEPKH

SEQ ID NO: 1954 - protein, 11 aa, Artificial
  IGFBP-2 heparin binding domain-containing peptide sequence
HKHLGLEEPKH

SEQ ID NO: 1955 - protein, 11 aa, Artificial
  IGFBP-2 heparin binding domain-containing peptide sequence
KRHLGLEEPKH

SEQ ID NO: 1956 - protein, 11 aa, Artificial
  IGFBP-2 heparin binding domain-containing peptide sequence
RRHLGLEEPKH

SEQ ID NO: 1957 - protein, 11 aa, Artificial
  IGFBP-2 heparin binding domain-containing peptide sequence
HRHLGLEEPKH

SEQ ID NO: 1958 - protein, 11 aa, Artificial
  IGFBP-2 heparin binding domain-containing peptide sequence
KHKLGLEEPKH

SEQ ID NO: 1959 - protein, 11 aa, Artificial
  IGFBP-2 heparin binding domain-containing peptide sequence
RHKLGLEEPKH

SEQ ID NO: 1960 - protein, 11 aa, Artificial
  IGFBP-2 heparin binding domain-containing peptide sequence
HHKLGLEEPKH

SEQ ID NO: 1961 - protein, 11 aa, Artificial
  IGFBP-2 heparin binding domain-containing peptide sequence
KKKLGLEEPKH

SEQ ID NO: 1962 - protein, 11 aa, Artificial
  IGFBP-2 heparin binding domain-containing peptide sequence
RKKLGLEEPKH

SEQ ID NO: 1963 - protein, 11 aa, Artificial
  IGFBP-2 heparin binding domain-containing peptide sequence
HKKLGLEEPKH

SEQ ID NO: 1964 - protein, 11 aa, Artificial
  IGFBP-2 heparin binding domain-containing peptide sequence
KRKLGLEEPKH

SEQ ID NO: 1965 - protein, 11 aa, Artificial
  IGFBP-2 heparin binding domain-containing peptide sequence
RRKLGLEEPKH

SEQ ID NO: 1966 - protein, 11 aa, Artificial
  IGFBP-2 heparin binding domain-containing peptide sequence
HRKLGLEEPKH

SEQ ID NO: 1967 - protein, 11 aa, Artificial
  IGFBP-2 heparin binding domain-containing peptide sequence
KHRLGLEEPKH

SEQ ID NO: 1968 - protein, 11 aa, Artificial
  IGFBP-2 heparin binding domain-containing peptide sequence
RHRLGLEEPKH

SEQ ID NO: 1969 - protein, 11 aa, Artificial
  IGFBP-2 heparin binding domain-containing peptide sequence
HHRLGLEEPKH

SEQ ID NO: 1970 - protein, 11 aa, Artificial
  IGFBP-2 heparin binding domain-containing peptide sequence
KKRLGLEEPKH

SEQ ID NO: 1971 - protein, 11 aa, Artificial
  IGFBP-2 heparin binding domain-containing peptide sequence
RKRLGLEEPKH

SEQ ID NO: 1972 - protein, 11 aa, Artificial
  IGFBP-2 heparin binding domain-containing peptide sequence
HKRLGLEEPKH

SEQ ID NO: 1973 - protein, 11 aa, Artificial
  IGFBP-2 heparin binding domain-containing peptide sequence
KRRLGLEEPKH

SEQ ID NO: 1974 - protein, 11 aa, Artificial
  IGFBP-2 heparin binding domain-containing peptide sequence
RRRLGLEEPKH

SEQ ID NO: 1975 - protein, 11 aa, Artificial
  IGFBP-2 heparin binding domain-containing peptide sequence
HRRLGLEEPKH

SEQ ID NO: 1976 - protein, 11 aa, Artificial
  IGFBP-2 heparin binding domain-containing peptide sequence
KHHIGLEEPKH

SEQ ID NO: 1977 - protein, 11 aa, Artificial
  IGFBP-2 heparin binding domain-containing peptide sequence
RHHIGLEEPKH

SEQ ID NO: 1978 - protein, 11 aa, Artificial
  IGFBP-2 heparin binding domain-containing peptide sequence
HHHIGLEEPKH

SEQ ID NO: 1979 - protein, 11 aa, Artificial
  IGFBP-2 heparin binding domain-containing peptide sequence
KKHIGLEEPKH

SEQ ID NO: 1980 - protein, 11 aa, Artificial
  IGFBP-2 heparin binding domain-containing peptide sequence
RKHIGLEEPKH

SEQ ID NO: 1981 - protein, 11 aa, Artificial
  IGFBP-2 heparin binding domain-containing peptide sequence
HKHIGLEEPKH

SEQ ID NO: 1982 - protein, 11 aa, Artificial
  IGFBP-2 heparin binding domain-containing peptide sequence
KRHIGLEEPKH

SEQ ID NO: 1983 - protein, 11 aa, Artificial
  IGFBP-2 heparin binding domain-containing peptide sequence
RRHIGLEEPKH

SEQ ID NO: 1984 - protein, 11 aa, Artificial
  IGFBP-2 heparin binding domain-containing peptide sequence
HRHIGLEEPKH

SEQ ID NO: 1985 - protein, 11 aa, Artificial
  IGFBP-2 heparin binding domain-containing peptide sequence
KHKIGLEEPKH

SEQ ID NO: 1986 - protein, 11 aa, Artificial
  IGFBP-2 heparin binding domain-containing peptide sequence
RHKIGLEEPKH

SEQ ID NO: 1987 - protein, 11 aa, Artificial
  IGFBP-2 heparin binding domain-containing peptide sequence
HHKIGLEEPKH

SEQ ID NO: 1988 - protein, 11 aa, Artificial
  IGFBP-2 heparin binding domain-containing peptide sequence
KKKIGLEEPKH

SEQ ID NO: 1989 - protein, 11 aa, Artificial
  IGFBP-2 heparin binding domain-containing peptide sequence
RKKIGLEEPKH

SEQ ID NO: 1990 - protein, 11 aa, Artificial
  IGFBP-2 heparin binding domain-containing peptide sequence
HKKIGLEEPKH

SEQ ID NO: 1991 - protein, 11 aa, Artificial
  IGFBP-2 heparin binding domain-containing peptide sequence
KRKIGLEEPKH

SEQ ID NO: 1992 - protein, 11 aa, Artificial
  IGFBP-2 heparin binding domain-containing peptide sequence
RRKIGLEEPKH

SEQ ID NO: 1993 - protein, 11 aa, Artificial
  IGFBP-2 heparin binding domain-containing peptide sequence
HRKIGLEEPKH

SEQ ID NO: 1994 - protein, 11 aa, Artificial
  IGFBP-2 heparin binding domain-containing peptide sequence
KHRIGLEEPKH

SEQ ID NO: 1995 - protein, 11 aa, Artificial
  IGFBP-2 heparin binding domain-containing peptide sequence
RHRIGLEEPKH

SEQ ID NO: 1996 - protein, 11 aa, Artificial
  IGFBP-2 heparin binding domain-containing peptide sequence
HHRIGLEEPKH

SEQ ID NO: 1997 - protein, 11 aa, Artificial
  IGFBP-2 heparin binding domain-containing peptide sequence
KKRIGLEEPKH

SEQ ID NO: 1998 - protein, 11 aa, Artificial
  IGFBP-2 heparin binding domain-containing peptide sequence
RKRIGLEEPKH

SEQ ID NO: 1999 - protein, 11 aa, Artificial
  IGFBP-2 heparin binding domain-containing peptide sequence
HKRIGLEEPKH

SEQ ID NO: 2000 - protein, 11 aa, Artificial
  IGFBP-2 heparin binding domain-containing peptide sequence
KRRIGLEEPKH

SEQ ID NO: 2001 - protein, 11 aa, Artificial
  IGFBP-2 heparin binding domain-containing peptide sequence
RRRIGLEEPKH

SEQ ID NO: 2002 - protein, 11 aa, Artificial
  IGFBP-2 heparin binding domain-containing peptide sequence
HRRIGLEEPKH

SEQ ID NO: 2003 - protein, 11 aa, Artificial
  IGFBP-2 heparin binding domain-containing peptide sequence
KHHVGLEEPKH

SEQ ID NO: 2004 - protein, 11 aa, Artificial
  IGFBP-2 heparin binding domain-containing peptide sequence
RHHVGLEEPKH

SEQ ID NO: 2005 - protein, 11 aa, Artificial
  IGFBP-2 heparin binding domain-containing peptide sequence
HHHVGLEEPKH

SEQ ID NO: 2006 - protein, 11 aa, Artificial
  IGFBP-2 heparin binding domain-containing peptide sequence
KKHVGLEEPKH

SEQ ID NO: 2007 - protein, 11 aa, Artificial
  IGFBP-2 heparin binding domain-containing peptide sequence
RKHVGLEEPKH

SEQ ID NO: 2008 - protein, 11 aa, Artificial
  IGFBP-2 heparin binding domain-containing peptide sequence
HKHVGLEEPKH

SEQ ID NO: 2009 - protein, 11 aa, Artificial
  IGFBP-2 heparin binding domain-containing peptide sequence
KRHVGLEEPKH

SEQ ID NO: 2010 - protein, 11 aa, Artificial
  IGFBP-2 heparin binding domain-containing peptide sequence
RRHVGLEEPKH

SEQ ID NO: 2011 - protein, 11 aa, Artificial
  IGFBP-2 heparin binding domain-containing peptide sequence
HRHVGLEEPKH

SEQ ID NO: 2012 - protein, 11 aa, Artificial
  IGFBP-2 heparin binding domain-containing peptide sequence
KHKVGLEEPKH

SEQ ID NO: 2013 - protein, 11 aa, Artificial
  IGFBP-2 heparin binding domain-containing peptide sequence
RHKVGLEEPKH

SEQ ID NO: 2014 - protein, 11 aa, Artificial
  IGFBP-2 heparin binding domain-containing peptide sequence
HHKVGLEEPKH

SEQ ID NO: 2015 - protein, 11 aa, Artificial
  IGFBP-2 heparin binding domain-containing peptide sequence
KKKVGLEEPKH

SEQ ID NO: 2016 - protein, 11 aa, Artificial
  IGFBP-2 heparin binding domain-containing peptide sequence
RKKVGLEEPKH

SEQ ID NO: 2017 - protein, 11 aa, Artificial
  IGFBP-2 heparin binding domain-containing peptide sequence
HKKVGLEEPKH

SEQ ID NO: 2018 - protein, 11 aa, Artificial
  IGFBP-2 heparin binding domain-containing peptide sequence
KRKVGLEEPKH

SEQ ID NO: 2019 - protein, 11 aa, Artificial
  IGFBP-2 heparin binding domain-containing peptide sequence
RRKVGLEEPKH

SEQ ID NO: 2020 - protein, 11 aa, Artificial
  IGFBP-2 heparin binding domain-containing peptide sequence
HRKVGLEEPKH

SEQ ID NO: 2021 - protein, 11 aa, Artificial
  IGFBP-2 heparin binding domain-containing peptide sequence
KHRVGLEEPKH

SEQ ID NO: 2022 - protein, 11 aa, Artificial
  IGFBP-2 heparin binding domain-containing peptide sequence
RHRVGLEEPKH

SEQ ID NO: 2023 - protein, 11 aa, Artificial
  IGFBP-2 heparin binding domain-containing peptide sequence
HHRVGLEEPKH

SEQ ID NO: 2024 - protein, 11 aa, Artificial
  IGFBP-2 heparin binding domain-containing peptide sequence
KKRVGLEEPKH

SEQ ID NO: 2025 - protein, 11 aa, Artificial
  IGFBP-2 heparin binding domain-containing peptide sequence
RKRVGLEEPKH

SEQ ID NO: 2026 - protein, 11 aa, Artificial
  IGFBP-2 heparin binding domain-containing peptide sequence
HKRVGLEEPKH

SEQ ID NO: 2027 - protein, 11 aa, Artificial
  IGFBP-2 heparin binding domain-containing peptide sequence
KRRVGLEEPKH

SEQ ID NO: 2028 - protein, 11 aa, Artificial
  IGFBP-2 heparin binding domain-containing peptide sequence
RRRVGLEEPKH

SEQ ID NO: 2029 - protein, 11 aa, Artificial
  IGFBP-2 heparin binding domain-containing peptide sequence
HRRVGLEEPKH

SEQ ID NO: 2030 - protein, 11 aa, Artificial
  IGFBP-2 heparin binding domain-containing peptide sequence
KHHLGIEEPKH

SEQ ID NO: 2031 - protein, 11 aa, Artificial
  IGFBP-2 heparin binding domain-containing peptide sequence
RHHLGIEEPKH

SEQ ID NO: 2032 - protein, 11 aa, Artificial
  IGFBP-2 heparin binding domain-containing peptide sequence
HHHLGIEEPKH

SEQ ID NO: 2033 - protein, 11 aa, Artificial
  IGFBP-2 heparin binding domain-containing peptide sequence
KKHLGIEEPKH

SEQ ID NO: 2034 - protein, 11 aa, Artificial
  IGFBP-2 heparin binding domain-containing peptide sequence
RKHLGIEEPKH

SEQ ID NO: 2035 - protein, 11 aa, Artificial
  IGFBP-2 heparin binding domain-containing peptide sequence
HKHLGIEEPKH

SEQ ID NO: 2036 - protein, 11 aa, Artificial
  IGFBP-2 heparin binding domain-containing peptide sequence
KRHLGIEEPKH

SEQ ID NO: 2037 - protein, 11 aa, Artificial
  IGFBP-2 heparin binding domain-containing peptide sequence
RRHLGIEEPKH

SEQ ID NO: 2038 - protein, 11 aa, Artificial
  IGFBP-2 heparin binding domain-containing peptide sequence
HRHLGIEEPKH

SEQ ID NO: 2039 - protein, 11 aa, Artificial
  IGFBP-2 heparin binding domain-containing peptide sequence
KHKLGIEEPKH

SEQ ID NO: 2040 - protein, 11 aa, Artificial
  IGFBP-2 heparin binding domain-containing peptide sequence
RHKLGIEEPKH

SEQ ID NO: 2041 - protein, 11 aa, Artificial
  IGFBP-2 heparin binding domain-containing peptide sequence
HHKLGIEEPKH

SEQ ID NO: 2042 - protein, 11 aa, Artificial
  IGFBP-2 heparin binding domain-containing peptide sequence
KKKLGIEEPKH

SEQ ID NO: 2043 - protein, 11 aa, Artificial
  IGFBP-2 heparin binding domain-containing peptide sequence
RKKLGIEEPKH

SEQ ID NO: 2044 - protein, 11 aa, Artificial
  IGFBP-2 heparin binding domain-containing peptide sequence
HKKLGIEEPKH

SEQ ID NO: 2045 - protein, 11 aa, Artificial
  IGFBP-2 heparin binding domain-containing peptide sequence
KRKLGIEEPKH

SEQ ID NO: 2046 - protein, 11 aa, Artificial
  IGFBP-2 heparin binding domain-containing peptide sequence
RRKLGIEEPKH

SEQ ID NO: 2047 - protein, 11 aa, Artificial
  IGFBP-2 heparin binding domain-containing peptide sequence
HRKLGIEEPKH

SEQ ID NO: 2048 - protein, 11 aa, Artificial
  IGFBP-2 heparin binding domain-containing peptide sequence
KHRLGIEEPKH

SEQ ID NO: 2049 - protein, 11 aa, Artificial
  IGFBP-2 heparin binding domain-containing peptide sequence
RHRLGIEEPKH

SEQ ID NO: 2050 - protein, 11 aa, Artificial
  IGFBP-2 heparin binding domain-containing peptide sequence
HHRLGIEEPKH

SEQ ID NO: 2051 - protein, 11 aa, Artificial
  IGFBP-2 heparin binding domain-containing peptide sequence
KKRLGIEEPKH

SEQ ID NO: 2052 - protein, 11 aa, Artificial
  IGFBP-2 heparin binding domain-containing peptide sequence
RKRLGIEEPKH

SEQ ID NO: 2053 - protein, 11 aa, Artificial
  IGFBP-2 heparin binding domain-containing peptide sequence
HKRLGIEEPKH

SEQ ID NO: 2054 - protein, 11 aa, Artificial
  IGFBP-2 heparin binding domain-containing peptide sequence
KRRLGIEEPKH

SEQ ID NO: 2055 - protein, 11 aa, Artificial
  IGFBP-2 heparin binding domain-containing peptide sequence
RRRLGIEEPKH

SEQ ID NO: 2056 - protein, 11 aa, Artificial
  IGFBP-2 heparin binding domain-containing peptide sequence
HRRLGIEEPKH

SEQ ID NO: 2057 - protein, 11 aa, Artificial
  IGFBP-2 heparin binding domain-containing peptide sequence
KHHIGIEEPKH

SEQ ID NO: 2058 - protein, 11 aa, Artificial
  IGFBP-2 heparin binding domain-containing peptide sequence
RHHIGIEEPKH

SEQ ID NO: 2059 - protein, 11 aa, Artificial
  IGFBP-2 heparin binding domain-containing peptide sequence
HHHIGIEEPKH

SEQ ID NO: 2060 - protein, 11 aa, Artificial
  IGFBP-2 heparin binding domain-containing peptide sequence
KKHIGIEEPKH

SEQ ID NO: 2061 - protein, 11 aa, Artificial
  IGFBP-2 heparin binding domain-containing peptide sequence
RKHIGIEEPKH

SEQ ID NO: 2062 - protein, 11 aa, Artificial
  IGFBP-2 heparin binding domain-containing peptide sequence
HKHIGIEEPKH

SEQ ID NO: 2063 - protein, 11 aa, Artificial
  IGFBP-2 heparin binding domain-containing peptide sequence
KRHIGIEEPKH

SEQ ID NO: 2064 - protein, 11 aa, Artificial
  IGFBP-2 heparin binding domain-containing peptide sequence
RRHIGIEEPKH

SEQ ID NO: 2065 - protein, 11 aa, Artificial
  IGFBP-2 heparin binding domain-containing peptide sequence
HRHIGIEEPKH

SEQ ID NO: 2066 - protein, 11 aa, Artificial
  IGFBP-2 heparin binding domain-containing peptide sequence
KHKIGIEEPKH

SEQ ID NO: 2067 - protein, 11 aa, Artificial
  IGFBP-2 heparin binding domain-containing peptide sequence
RHKIGIEEPKH

SEQ ID NO: 2068 - protein, 11 aa, Artificial
  IGFBP-2 heparin binding domain-containing peptide sequence
HHKIGIEEPKH

SEQ ID NO: 2069 - protein, 11 aa, Artificial
  IGFBP-2 heparin binding domain-containing peptide sequence
KKKIGIEEPKH

SEQ ID NO: 2070 - protein, 11 aa, Artificial
  IGFBP-2 heparin binding domain-containing peptide sequence
RKKIGIEEPKH

SEQ ID NO: 2071 - protein, 11 aa, Artificial
  IGFBP-2 heparin binding domain-containing peptide sequence
HKKIGIEEPKH

SEQ ID NO: 2072 - protein, 11 aa, Artificial
  IGFBP-2 heparin binding domain-containing peptide sequence
KRKIGIEEPKH

SEQ ID NO: 2073 - protein, 11 aa, Artificial
  IGFBP-2 heparin binding domain-containing peptide sequence
RRKIGIEEPKH

SEQ ID NO: 2074 - protein, 11 aa, Artificial
  IGFBP-2 heparin binding domain-containing peptide sequence
HRKIGIEEPKH

SEQ ID NO: 2075 - protein, 11 aa, Artificial
  IGFBP-2 heparin binding domain-containing peptide sequence
KHRIGIEEPKH

SEQ ID NO: 2076 - protein, 11 aa, Artificial
  IGFBP-2 heparin binding domain-containing peptide sequence
RHRIGIEEPKH

SEQ ID NO: 2077 - protein, 11 aa, Artificial
  IGFBP-2 heparin binding domain-containing peptide sequence
HHRIGIEEPKH

SEQ ID NO: 2078 - protein, 11 aa, Artificial
  IGFBP-2 heparin binding domain-containing peptide sequence
KKRIGIEEPKH

SEQ ID NO: 2079 - protein, 11 aa, Artificial
  IGFBP-2 heparin binding domain-containing peptide sequence
RKRIGIEEPKH

SEQ ID NO: 2080 - protein, 11 aa, Artificial
  IGFBP-2 heparin binding domain-containing peptide sequence
HKRIGIEEPKH

SEQ ID NO: 2081 - protein, 11 aa, Artificial
  IGFBP-2 heparin binding domain-containing peptide sequence
KRRIGIEEPKH

SEQ ID NO: 2082 - protein, 11 aa, Artificial
  IGFBP-2 heparin binding domain-containing peptide sequence
RRRIGIEEPKH

SEQ ID NO: 2083 - protein, 11 aa, Artificial
  IGFBP-2 heparin binding domain-containing peptide sequence
HRRIGIEEPKH

SEQ ID NO: 2084 - protein, 11 aa, Artificial
  IGFBP-2 heparin binding domain-containing peptide sequence
KHHVGIEEPKH

SEQ ID NO: 2085 - protein, 11 aa, Artificial
  IGFBP-2 heparin binding domain-containing peptide sequence
RHHVGIEEPKH

SEQ ID NO: 2086 - protein, 11 aa, Artificial
  IGFBP-2 heparin binding domain-containing peptide sequence
HHHVGIEEPKH

SEQ ID NO: 2087 - protein, 11 aa, Artificial
  IGFBP-2 heparin binding domain-containing peptide sequence
KKHVGIEEPKH

SEQ ID NO: 2088 - protein, 11 aa, Artificial
  IGFBP-2 heparin binding domain-containing peptide sequence
RKHVGIEEPKH

SEQ ID NO: 2089 - protein, 11 aa, Artificial
  IGFBP-2 heparin binding domain-containing peptide sequence
HKHVGIEEPKH

SEQ ID NO: 2090 - protein, 11 aa, Artificial
  IGFBP-2 heparin binding domain-containing peptide sequence
KRHVGIEEPKH

SEQ ID NO: 2091 - protein, 11 aa, Artificial
  IGFBP-2 heparin binding domain-containing peptide sequence
RRHVGIEEPKH

SEQ ID NO: 2092 - protein, 11 aa, Artificial
  IGFBP-2 heparin binding domain-containing peptide sequence
HRHVGIEEPKH

SEQ ID NO: 2093 - protein, 11 aa, Artificial
  IGFBP-2 heparin binding domain-containing peptide sequence
KHKVGIEEPKH

SEQ ID NO: 2094 - protein, 11 aa, Artificial
  IGFBP-2 heparin binding domain-containing peptide sequence
RHKVGIEEPKH

SEQ ID NO: 2095 - protein, 11 aa, Artificial
  IGFBP-2 heparin binding domain-containing peptide sequence
HHKVGIEEPKH

SEQ ID NO: 2096 - protein, 11 aa, Artificial
  IGFBP-2 heparin binding domain-containing peptide sequence
KKKVGIEEPKH

SEQ ID NO: 2097 - protein, 11 aa, Artificial
  IGFBP-2 heparin binding domain-containing peptide sequence
RKKVGIEEPKH

SEQ ID NO: 2098 - protein, 11 aa, Artificial
  IGFBP-2 heparin binding domain-containing peptide sequence
HKKVGIEEPKH

SEQ ID NO: 2099 - protein, 11 aa, Artificial
  IGFBP-2 heparin binding domain-containing peptide sequence
KRKVGIEEPKH

SEQ ID NO: 2100 - protein, 11 aa, Artificial
  IGFBP-2 heparin binding domain-containing peptide sequence
RRKVGIEEPKH

SEQ ID NO: 2101 - protein, 11 aa, Artificial
  IGFBP-2 heparin binding domain-containing peptide sequence
HRKVGIEEPKH

SEQ ID NO: 2102 - protein, 11 aa, Artificial
  IGFBP-2 heparin binding domain-containing peptide sequence
KHRVGIEEPKH

SEQ ID NO: 2103 - protein, 11 aa, Artificial
  IGFBP-2 heparin binding domain-containing peptide sequence
RHRVGIEEPKH

SEQ ID NO: 2104 - protein, 11 aa, Artificial
  IGFBP-2 heparin binding domain-containing peptide sequence
HHRVGIEEPKH

SEQ ID NO: 2105 - protein, 11 aa, Artificial
  IGFBP-2 heparin binding domain-containing peptide sequence
KKRVGIEEPKH

SEQ ID NO: 2106 - protein, 11 aa, Artificial
  IGFBP-2 heparin binding domain-containing peptide sequence
RKRVGIEEPKH

SEQ ID NO: 2107 - protein, 11 aa, Artificial
  IGFBP-2 heparin binding domain-containing peptide sequence
HKRVGIEEPKH

SEQ ID NO: 2108 - protein, 11 aa, Artificial
  IGFBP-2 heparin binding domain-containing peptide sequence
KRRVGIEEPKH

SEQ ID NO: 2109 - protein, 11 aa, Artificial
  IGFBP-2 heparin binding domain-containing peptide sequence
RRRVGIEEPKH

SEQ ID NO: 2110 - protein, 11 aa, Artificial
  IGFBP-2 heparin binding domain-containing peptide sequence
HRRVGIEEPKH

SEQ ID NO: 2111 - protein, 11 aa, Artificial
  IGFBP-2 heparin binding domain-containing peptide sequence
KHHLGVEEPKH

SEQ ID NO: 2112 - protein, 11 aa, Artificial
  IGFBP-2 heparin binding domain-containing peptide sequence
RHHLGVEEPKH

SEQ ID NO: 2113 - protein, 11 aa, Artificial
  IGFBP-2 heparin binding domain-containing peptide sequence
HHHLGVEEPKH

SEQ ID NO: 2114 - protein, 11 aa, Artificial
  IGFBP-2 heparin binding domain-containing peptide sequence
KKHLGVEEPKH

SEQ ID NO: 2115 - protein, 11 aa, Artificial
  IGFBP-2 heparin binding domain-containing peptide sequence
RKHLGVEEPKH

SEQ ID NO: 2116 - protein, 11 aa, Artificial
  IGFBP-2 heparin binding domain-containing peptide sequence
HKHLGVEEPKH

SEQ ID NO: 2117 - protein, 11 aa, Artificial
  IGFBP-2 heparin binding domain-containing peptide sequence
KRHLGVEEPKH

SEQ ID NO: 2118 - protein, 11 aa, Artificial
  IGFBP-2 heparin binding domain-containing peptide sequence
RRHLGVEEPKH

SEQ ID NO: 2119 - protein, 11 aa, Artificial
  IGFBP-2 heparin binding domain-containing peptide sequence
HRHLGVEEPKH

SEQ ID NO: 2120 - protein, 11 aa, Artificial
  IGFBP-2 heparin binding domain-containing peptide sequence
KHKLGVEEPKH

SEQ ID NO: 2121 - protein, 11 aa, Artificial
  IGFBP-2 heparin binding domain-containing peptide sequence
RHKLGVEEPKH

SEQ ID NO: 2122 - protein, 11 aa, Artificial
  IGFBP-2 heparin binding domain-containing peptide sequence
HHKLGVEEPKH

SEQ ID NO: 2123 - protein, 11 aa, Artificial
  IGFBP-2 heparin binding domain-containing peptide sequence
KKKLGVEEPKH

SEQ ID NO: 2124 - protein, 11 aa, Artificial
  IGFBP-2 heparin binding domain-containing peptide sequence
RKKLGVEEPKH

SEQ ID NO: 2125 - protein, 11 aa, Artificial
  IGFBP-2 heparin binding domain-containing peptide sequence
HKKLGVEEPKH

SEQ ID NO: 2126 - protein, 11 aa, Artificial
  IGFBP-2 heparin binding domain-containing peptide sequence
KRKLGVEEPKH

SEQ ID NO: 2127 - protein, 11 aa, Artificial
  IGFBP-2 heparin binding domain-containing peptide sequence
RRKLGVEEPKH

SEQ ID NO: 2128 - protein, 11 aa, Artificial
  IGFBP-2 heparin binding domain-containing peptide sequence
HRKLGVEEPKH

SEQ ID NO: 2129 - protein, 11 aa, Artificial
  IGFBP-2 heparin binding domain-containing peptide sequence
KHRLGVEEPKH

SEQ ID NO: 2130 - protein, 11 aa, Artificial
  IGFBP-2 heparin binding domain-containing peptide sequence
RHRLGVEEPKH

SEQ ID NO: 2131 - protein, 11 aa, Artificial
  IGFBP-2 heparin binding domain-containing peptide sequence
HHRLGVEEPKH

SEQ ID NO: 2132 - protein, 11 aa, Artificial
  IGFBP-2 heparin binding domain-containing peptide sequence
KKRLGVEEPKH

SEQ ID NO: 2133 - protein, 11 aa, Artificial
  IGFBP-2 heparin binding domain-containing peptide sequence
RKRLGVEEPKH

SEQ ID NO: 2134 - protein, 11 aa, Artificial
  IGFBP-2 heparin binding domain-containing peptide sequence
HKRLGVEEPKH

SEQ ID NO: 2135 - protein, 11 aa, Artificial
  IGFBP-2 heparin binding domain-containing peptide sequence
KRRLGVEEPKH

SEQ ID NO: 2136 - protein, 11 aa, Artificial
  IGFBP-2 heparin binding domain-containing peptide sequence
RRRLGVEEPKH

SEQ ID NO: 2137 - protein, 11 aa, Artificial
  IGFBP-2 heparin binding domain-containing peptide sequence
HRRLGVEEPKH

SEQ ID NO: 2138 - protein, 11 aa, Artificial
  IGFBP-2 heparin binding domain-containing peptide sequence
KHHIGVEEPKH

SEQ ID NO: 2139 - protein, 11 aa, Artificial
  IGFBP-2 heparin binding domain-containing peptide sequence
RHHIGVEEPKH

SEQ ID NO: 2140 - protein, 11 aa, Artificial
  IGFBP-2 heparin binding domain-containing peptide sequence
HHHIGVEEPKH

SEQ ID NO: 2141 - protein, 11 aa, Artificial
  IGFBP-2 heparin binding domain-containing peptide sequence
KKHIGVEEPKH

SEQ ID NO: 2142 - protein, 11 aa, Artificial
  IGFBP-2 heparin binding domain-containing peptide sequence
RKHIGVEEPKH

SEQ ID NO: 2143 - protein, 11 aa, Artificial
  IGFBP-2 heparin binding domain-containing peptide sequence
HKHIGVEEPKH

SEQ ID NO: 2144 - protein, 11 aa, Artificial
  IGFBP-2 heparin binding domain-containing peptide sequence
KRHIGVEEPKH

SEQ ID NO: 2145 - protein, 11 aa, Artificial
  IGFBP-2 heparin binding domain-containing peptide sequence
RRHIGVEEPKH

SEQ ID NO: 2146 - protein, 11 aa, Artificial
  IGFBP-2 heparin binding domain-containing peptide sequence
HRHIGVEEPKH

SEQ ID NO: 2147 - protein, 11 aa, Artificial
  IGFBP-2 heparin binding domain-containing peptide sequence
KHKIGVEEPKH

SEQ ID NO: 2148 - protein, 11 aa, Artificial
  IGFBP-2 heparin binding domain-containing peptide sequence
RHKIGVEEPKH

SEQ ID NO: 2149 - protein, 11 aa, Artificial
  IGFBP-2 heparin binding domain-containing peptide sequence
HHKIGVEEPKH

SEQ ID NO: 2150 - protein, 11 aa, Artificial
  IGFBP-2 heparin binding domain-containing peptide sequence
KKKIGVEEPKH

SEQ ID NO: 2151 - protein, 11 aa, Artificial
  IGFBP-2 heparin binding domain-containing peptide sequence
RKKIGVEEPKH

SEQ ID NO: 2152 - protein, 11 aa, Artificial
  IGFBP-2 heparin binding domain-containing peptide sequence
HKKIGVEEPKH

SEQ ID NO: 2153 - protein, 11 aa, Artificial
  IGFBP-2 heparin binding domain-containing peptide sequence
KRKIGVEEPKH

SEQ ID NO: 2154 - protein, 11 aa, Artificial
  IGFBP-2 heparin binding domain-containing peptide sequence
RRKIGVEEPKH

SEQ ID NO: 2155 - protein, 11 aa, Artificial
  IGFBP-2 heparin binding domain-containing peptide sequence
HRKIGVEEPKH

SEQ ID NO: 2156 - protein, 11 aa, Artificial
  IGFBP-2 heparin binding domain-containing peptide sequence
KHRIGVEEPKH

SEQ ID NO: 2157 - protein, 11 aa, Artificial
  IGFBP-2 heparin binding domain-containing peptide sequence
RHRIGVEEPKH

SEQ ID NO: 2158 - protein, 11 aa, Artificial
  IGFBP-2 heparin binding domain-containing peptide sequence
HHRIGVEEPKH

SEQ ID NO: 2159 - protein, 11 aa, Artificial
  IGFBP-2 heparin binding domain-containing peptide sequence
KKRIGVEEPKH

SEQ ID NO: 2160 - protein, 11 aa, Artificial
  IGFBP-2 heparin binding domain-containing peptide sequence
RKRIGVEEPKH

SEQ ID NO: 2161 - protein, 11 aa, Artificial
  IGFBP-2 heparin binding domain-containing peptide sequence
HKRIGVEEPKH

SEQ ID NO: 2162 - protein, 11 aa, Artificial
  IGFBP-2 heparin binding domain-containing peptide sequence
KRRIGVEEPKH

SEQ ID NO: 2163 - protein, 11 aa, Artificial
  IGFBP-2 heparin binding domain-containing peptide sequence
RRRIGVEEPKH

SEQ ID NO: 2164 - protein, 11 aa, Artificial
  IGFBP-2 heparin binding domain-containing peptide sequence
HRRIGVEEPKH

SEQ ID NO: 2165 - protein, 11 aa, Artificial
  IGFBP-2 heparin binding domain-containing peptide sequence
KHHVGVEEPKH

SEQ ID NO: 2166 - protein, 11 aa, Artificial
  IGFBP-2 heparin binding domain-containing peptide sequence
RHHVGVEEPKH

SEQ ID NO: 2167 - protein, 11 aa, Artificial
  IGFBP-2 heparin binding domain-containing peptide sequence
HHHVGVEEPKH

SEQ ID NO: 2168 - protein, 11 aa, Artificial
  IGFBP-2 heparin binding domain-containing peptide sequence
KKHVGVEEPKH

SEQ ID NO: 2169 - protein, 11 aa, Artificial
  IGFBP-2 heparin binding domain-containing peptide sequence
RKHVGVEEPKH

SEQ ID NO: 2170 - protein, 11 aa, Artificial
  IGFBP-2 heparin binding domain-containing peptide sequence
HKHVGVEEPKH

SEQ ID NO: 2171 - protein, 11 aa, Artificial
  IGFBP-2 heparin binding domain-containing peptide sequence
KRHVGVEEPKH

SEQ ID NO: 2172 - protein, 11 aa, Artificial
  IGFBP-2 heparin binding domain-containing peptide sequence
RRHVGVEEPKH

SEQ ID NO: 2173 - protein, 11 aa, Artificial
  IGFBP-2 heparin binding domain-containing peptide sequence
HRHVGVEEPKH

SEQ ID NO: 2174 - protein, 11 aa, Artificial
  IGFBP-2 heparin binding domain-containing peptide sequence
KHKVGVEEPKH

SEQ ID NO: 2175 - protein, 11 aa, Artificial
  IGFBP-2 heparin binding domain-containing peptide sequence
RHKVGVEEPKH

SEQ ID NO: 2176 - protein, 11 aa, Artificial
  IGFBP-2 heparin binding domain-containing peptide sequence
HHKVGVEEPKH

SEQ ID NO: 2177 - protein, 11 aa, Artificial
  IGFBP-2 heparin binding domain-containing peptide sequence
KKKVGVEEPKH

SEQ ID NO: 2178 - protein, 11 aa, Artificial
  IGFBP-2 heparin binding domain-containing peptide sequence
RKKVGVEEPKH

SEQ ID NO: 2179 - protein, 11 aa, Artificial
  IGFBP-2 heparin binding domain-containing peptide sequence
HKKVGVEEPKH

SEQ ID NO: 2180 - protein, 11 aa, Artificial
  IGFBP-2 heparin binding domain-containing peptide sequence
KRKVGVEEPKH

SEQ ID NO: 2181 - protein, 11 aa, Artificial
  IGFBP-2 heparin binding domain-containing peptide sequence
RRKVGVEEPKH

SEQ ID NO: 2182 - protein, 11 aa, Artificial
  IGFBP-2 heparin binding domain-containing peptide sequence
HRKVGVEEPKH

SEQ ID NO: 2183 - protein, 11 aa, Artificial
  IGFBP-2 heparin binding domain-containing peptide sequence
KHRVGVEEPKH

SEQ ID NO: 2184 - protein, 11 aa, Artificial
  IGFBP-2 heparin binding domain-containing peptide sequence
RHRVGVEEPKH

SEQ ID NO: 2185 - protein, 11 aa, Artificial
  IGFBP-2 heparin binding domain-containing peptide sequence
HHRVGVEEPKH

SEQ ID NO: 2186 - protein, 11 aa, Artificial
  IGFBP-2 heparin binding domain-containing peptide sequence
KKRVGVEEPKH

SEQ ID NO: 2187 - protein, 11 aa, Artificial
  IGFBP-2 heparin binding domain-containing peptide sequence
RKRVGVEEPKH

SEQ ID NO: 2188 - protein, 11 aa, Artificial
  IGFBP-2 heparin binding domain-containing peptide sequence
HKRVGVEEPKH

SEQ ID NO: 2189 - protein, 11 aa, Artificial
  IGFBP-2 heparin binding domain-containing peptide sequence
KRRVGVEEPKH

SEQ ID NO: 2190 - protein, 11 aa, Artificial
  IGFBP-2 heparin binding domain-containing peptide sequence
RRRVGVEEPKH

SEQ ID NO: 2191 - protein, 11 aa, Artificial
  IGFBP-2 heparin binding domain-containing peptide sequence
HRRVGVEEPKH

SEQ ID NO: 2192 - protein, 11 aa, Artificial
  IGFBP-2 heparin binding domain-containing peptide sequence
KHHLGLNEPKH

SEQ ID NO: 2193 - protein, 11 aa, Artificial
  IGFBP-2 heparin binding domain-containing peptide sequence
RHHLGLNEPKH

SEQ ID NO: 2194 - protein, 11 aa, Artificial
  IGFBP-2 heparin binding domain-containing peptide sequence
HHHLGLNEPKH

SEQ ID NO: 2195 - protein, 11 aa, Artificial
  IGFBP-2 heparin binding domain-containing peptide sequence
KKHLGLNEPKH

SEQ ID NO: 2196 - protein, 11 aa, Artificial
  IGFBP-2 heparin binding domain-containing peptide sequence
RKHLGLNEPKH

SEQ ID NO: 2197 - protein, 11 aa, Artificial
  IGFBP-2 heparin binding domain-containing peptide sequence
HKHLGLNEPKH

SEQ ID NO: 2198 - protein, 11 aa, Artificial
  IGFBP-2 heparin binding domain-containing peptide sequence
KRHLGLNEPKH

SEQ ID NO: 2199 - protein, 11 aa, Artificial
  IGFBP-2 heparin binding domain-containing peptide sequence
RRHLGLNEPKH

SEQ ID NO: 2200 - protein, 11 aa, Artificial
  IGFBP-2 heparin binding domain-containing peptide sequence
HRHLGLNEPKH

SEQ ID NO: 2201 - protein, 11 aa, Artificial
  IGFBP-2 heparin binding domain-containing peptide sequence
KHKLGLNEPKH

SEQ ID NO: 2202 - protein, 11 aa, Artificial
  IGFBP-2 heparin binding domain-containing peptide sequence
RHKLGLNEPKH

SEQ ID NO: 2203 - protein, 11 aa, Artificial
  IGFBP-2 heparin binding domain-containing peptide sequence
HHKLGLNEPKH

SEQ ID NO: 2204 - protein, 11 aa, Artificial
  IGFBP-2 heparin binding domain-containing peptide sequence
KKKLGLNEPKH

SEQ ID NO: 2205 - protein, 11 aa, Artificial
  IGFBP-2 heparin binding domain-containing peptide sequence
RKKLGLNEPKH

SEQ ID NO: 2206 - protein, 11 aa, Artificial
  IGFBP-2 heparin binding domain-containing peptide sequence
HKKLGLNEPKH

SEQ ID NO: 2207 - protein, 11 aa, Artificial
  IGFBP-2 heparin binding domain-containing peptide sequence
KRKLGLNEPKH

SEQ ID NO: 2208 - protein, 11 aa, Artificial
  IGFBP-2 heparin binding domain-containing peptide sequence
RRKLGLNEPKH

SEQ ID NO: 2209 - protein, 11 aa, Artificial
  IGFBP-2 heparin binding domain-containing peptide sequence
HRKLGLNEPKH

SEQ ID NO: 2210 - protein, 11 aa, Artificial
  IGFBP-2 heparin binding domain-containing peptide sequence
KHRLGLNEPKH

SEQ ID NO: 2211 - protein, 11 aa, Artificial
  IGFBP-2 heparin binding domain-containing peptide sequence
RHRLGLNEPKH

SEQ ID NO: 2212 - protein, 11 aa, Artificial
  IGFBP-2 heparin binding domain-containing peptide sequence
HHRLGLNEPKH

SEQ ID NO: 2213 - protein, 11 aa, Artificial
  IGFBP-2 heparin binding domain-containing peptide sequence
KKRLGLNEPKH

SEQ ID NO: 2214 - protein, 11 aa, Artificial
  IGFBP-2 heparin binding domain-containing peptide sequence
RKRLGLNEPKH

SEQ ID NO: 2215 - protein, 11 aa, Artificial
  IGFBP-2 heparin binding domain-containing peptide sequence
HKRLGLNEPKH

SEQ ID NO: 2216 - protein, 11 aa, Artificial
  IGFBP-2 heparin binding domain-containing peptide sequence
KRRLGLNEPKH

SEQ ID NO: 2217 - protein, 11 aa, Artificial
  IGFBP-2 heparin binding domain-containing peptide sequence
RRRLGLNEPKH

SEQ ID NO: 2218 - protein, 11 aa, Artificial
  IGFBP-2 heparin binding domain-containing peptide sequence
HRRLGLNEPKH

SEQ ID NO: 2219 - protein, 10 aa, Artificial
  IGFBP-2 heparin binding domain-containing peptide sequence
KHHIGLNPKH

SEQ ID NO: 2220 - protein, 11 aa, Artificial
  IGFBP-2 heparin binding domain-containing peptide sequence
RHHIGLNEPKH

SEQ ID NO: 2221 - protein, 11 aa, Artificial
  IGFBP-2 heparin binding domain-containing peptide sequence
HHHIGLNEPKH

SEQ ID NO: 2222 - protein, 11 aa, Artificial
  IGFBP-2 heparin binding domain-containing peptide sequence
KKHIGLNEPKH

SEQ ID NO: 2223 - protein, 11 aa, Artificial
  IGFBP-2 heparin binding domain-containing peptide sequence
RKHIGLNEPKH

SEQ ID NO: 2224 - protein, 11 aa, Artificial
  IGFBP-2 heparin binding domain-containing peptide sequence
HKHIGLNEPKH

SEQ ID NO: 2225 - protein, 11 aa, Artificial
  IGFBP-2 heparin binding domain-containing peptide sequence
KRHIGLNEPKH

SEQ ID NO: 2226 - protein, 11 aa, Artificial
  IGFBP-2 heparin binding domain-containing peptide sequence
RRHIGLNEPKH

SEQ ID NO: 2227 - protein, 11 aa, Artificial
  IGFBP-2 heparin binding domain-containing peptide sequence
HRHIGLNEPKH

SEQ ID NO: 2228 - protein, 11 aa, Artificial
  IGFBP-2 heparin binding domain-containing peptide sequence
KHKIGLNEPKH

SEQ ID NO: 2229 - protein, 11 aa, Artificial
  IGFBP-2 heparin binding domain-containing peptide sequence
RHKIGLNEPKH

SEQ ID NO: 2230 - protein, 11 aa, Artificial
  IGFBP-2 heparin binding domain-containing peptide sequence
HHKIGLNEPKH

SEQ ID NO: 2231 - protein, 11 aa, Artificial
  IGFBP-2 heparin binding domain-containing peptide sequence
KKKIGLNEPKH

SEQ ID NO: 2232 - protein, 11 aa, Artificial
  IGFBP-2 heparin binding domain-containing peptide sequence
RKKIGLNEPKH

SEQ ID NO: 2233 - protein, 11 aa, Artificial
  IGFBP-2 heparin binding domain-containing peptide sequence
HKKIGLNEPKH

SEQ ID NO: 2234 - protein, 11 aa, Artificial
  IGFBP-2 heparin binding domain-containing peptide sequence
KRKIGLNEPKH

SEQ ID NO: 2235 - protein, 11 aa, Artificial
  IGFBP-2 heparin binding domain-containing peptide sequence
RRKIGLNEPKH

SEQ ID NO: 2236 - protein, 11 aa, Artificial
  IGFBP-2 heparin binding domain-containing peptide sequence
HRKIGLNEPKH

SEQ ID NO: 2237 - protein, 11 aa, Artificial
  IGFBP-2 heparin binding domain-containing peptide sequence
KHRIGLNEPKH

SEQ ID NO: 2238 - protein, 11 aa, Artificial
  IGFBP-2 heparin binding domain-containing peptide sequence
RHRIGLNEPKH

SEQ ID NO: 2239 - protein, 11 aa, Artificial
  IGFBP-2 heparin binding domain-containing peptide sequence
HHRIGLNEPKH

SEQ ID NO: 2240 - protein, 11 aa, Artificial
  IGFBP-2 heparin binding domain-containing peptide sequence
KKRIGLNEPKH

SEQ ID NO: 2241 - protein, 11 aa, Artificial
  IGFBP-2 heparin binding domain-containing peptide sequence
RKRIGLNEPKH

SEQ ID NO: 2242 - protein, 11 aa, Artificial
  IGFBP-2 heparin binding domain-containing peptide sequence
HKRIGLNEPKH

SEQ ID NO: 2243 - protein, 11 aa, Artificial
  IGFBP-2 heparin binding domain-containing peptide sequence
KRRIGLNEPKH

SEQ ID NO: 2244 - protein, 11 aa, Artificial
  IGFBP-2 heparin binding domain-containing peptide sequence
RRRIGLNEPKH

SEQ ID NO: 2245 - protein, 11 aa, Artificial
  IGFBP-2 heparin binding domain-containing peptide sequence
HRRIGLNEPKH

SEQ ID NO: 2246 - protein, 11 aa, Artificial
  IGFBP-2 heparin binding domain-containing peptide sequence
KHHVGLNEPKH

SEQ ID NO: 2247 - protein, 11 aa, Artificial
  IGFBP-2 heparin binding domain-containing peptide sequence
RHHVGLNEPKH

SEQ ID NO: 2248 - protein, 11 aa, Artificial
  IGFBP-2 heparin binding domain-containing peptide sequence
HHHVGLNEPKH

SEQ ID NO: 2249 - protein, 11 aa, Artificial
  IGFBP-2 heparin binding domain-containing peptide sequence
KKHVGLNEPKH

SEQ ID NO: 2250 - protein, 11 aa, Artificial
  IGFBP-2 heparin binding domain-containing peptide sequence
RKHVGLNEPKH

SEQ ID NO: 2251 - protein, 11 aa, Artificial
  IGFBP-2 heparin binding domain-containing peptide sequence
HKHVGLNEPKH

SEQ ID NO: 2252 - protein, 11 aa, Artificial
  IGFBP-2 heparin binding domain-containing peptide sequence
KRHVGLNEPKH

SEQ ID NO: 2253 - protein, 11 aa, Artificial
  IGFBP-2 heparin binding domain-containing peptide sequence
RRHVGLNEPKH

SEQ ID NO: 2254 - protein, 11 aa, Artificial
  IGFBP-2 heparin binding domain-containing peptide sequence
HRHVGLNEPKH

SEQ ID NO: 2255 - protein, 11 aa, Artificial
  IGFBP-2 heparin binding domain-containing peptide sequence
KHKVGLNEPKH

SEQ ID NO: 2256 - protein, 11 aa, Artificial
  IGFBP-2 heparin binding domain-containing peptide sequence
RHKVGLNEPKH

SEQ ID NO: 2257 - protein, 11 aa, Artificial
  IGFBP-2 heparin binding domain-containing peptide sequence
HHKVGLNEPKH

SEQ ID NO: 2258 - protein, 11 aa, Artificial
  IGFBP-2 heparin binding domain-containing peptide sequence
KKKVGLNEPKH

SEQ ID NO: 2259 - protein, 11 aa, Artificial
  IGFBP-2 heparin binding domain-containing peptide sequence
RKKVGLNEPKH

SEQ ID NO: 2260 - protein, 11 aa, Artificial
  IGFBP-2 heparin binding domain-containing peptide sequence
HKKVGLNEPKH

SEQ ID NO: 2261 - protein, 11 aa, Artificial
  IGFBP-2 heparin binding domain-containing peptide sequence
KRKVGLNEPKH

SEQ ID NO: 2262 - protein, 11 aa, Artificial
  IGFBP-2 heparin binding domain-containing peptide sequence
RRKVGLNEPKH

SEQ ID NO: 2263 - protein, 11 aa, Artificial
  IGFBP-2 heparin binding domain-containing peptide sequence
HRKVGLNEPKH

SEQ ID NO: 2264 - protein, 11 aa, Artificial
  IGFBP-2 heparin binding domain-containing peptide sequence
KHRVGLNEPKH

SEQ ID NO: 2265 - protein, 11 aa, Artificial
  IGFBP-2 heparin binding domain-containing peptide sequence
RHRVGLNEPKH

SEQ ID NO: 2266 - protein, 11 aa, Artificial
  IGFBP-2 heparin binding domain-containing peptide sequence
HHRVGLNEPKH

SEQ ID NO: 2267 - protein, 11 aa, Artificial
  IGFBP-2 heparin binding domain-containing peptide sequence
KKRVGLNEPKH

SEQ ID NO: 2268 - protein, 11 aa, Artificial
  IGFBP-2 heparin binding domain-containing peptide sequence
RKRVGLNEPKH

SEQ ID NO: 2269 - protein, 11 aa, Artificial
  IGFBP-2 heparin binding domain-containing peptide sequence
HKRVGLNEPKH

SEQ ID NO: 2270 - protein, 11 aa, Artificial
  IGFBP-2 heparin binding domain-containing peptide sequence
KRRVGLNEPKH

SEQ ID NO: 2271 - protein, 11 aa, Artificial
  IGFBP-2 heparin binding domain-containing peptide sequence
RRRVGLNEPKH

SEQ ID NO: 2272 - protein, 11 aa, Artificial
  IGFBP-2 heparin binding domain-containing peptide sequence
HRRVGLNEPKH

SEQ ID NO: 2273 - protein, 11 aa, Artificial
  IGFBP-2 heparin binding domain-containing peptide sequence
KHHLGINEPKH

SEQ ID NO: 2274 - protein, 11 aa, Artificial
  IGFBP-2 heparin binding domain-containing peptide sequence
RHHLGINEPKH

SEQ ID NO: 2275 - protein, 11 aa, Artificial
  IGFBP-2 heparin binding domain-containing peptide sequence
HHHLGINEPKH

SEQ ID NO: 2276 - protein, 11 aa, Artificial
  IGFBP-2 heparin binding domain-containing peptide sequence
KKHLGINEPKH

SEQ ID NO: 2277 - protein, 11 aa, Artificial
  IGFBP-2 heparin binding domain-containing peptide sequence
RKHLGINEPKH

SEQ ID NO: 2278 - protein, 11 aa, Artificial
  IGFBP-2 heparin binding domain-containing peptide sequence
HKHLGINEPKH

SEQ ID NO: 2279 - protein, 11 aa, Artificial
  IGFBP-2 heparin binding domain-containing peptide sequence
KRHLGINEPKH

SEQ ID NO: 2280 - protein, 11 aa, Artificial
  IGFBP-2 heparin binding domain-containing peptide sequence
RRHLGINEPKH

SEQ ID NO: 2281 - protein, 11 aa, Artificial
  IGFBP-2 heparin binding domain-containing peptide sequence
HRHLGINEPKH

SEQ ID NO: 2282 - protein, 11 aa, Artificial
  IGFBP-2 heparin binding domain-containing peptide sequence
KHKLGINEPKH

SEQ ID NO: 2283 - protein, 11 aa, Artificial
  IGFBP-2 heparin binding domain-containing peptide sequence
RHKLGINEPKH

SEQ ID NO: 2284 - protein, 11 aa, Artificial
  IGFBP-2 heparin binding domain-containing peptide sequence
HHKLGINEPKH

SEQ ID NO: 2285 - protein, 11 aa, Artificial
  IGFBP-2 heparin binding domain-containing peptide sequence
KKKLGINEPKH

SEQ ID NO: 2286 - protein, 11 aa, Artificial
  IGFBP-2 heparin binding domain-containing peptide sequence
RKKLGINEPKH

SEQ ID NO: 2287 - protein, 11 aa, Artificial
  IGFBP-2 heparin binding domain-containing peptide sequence
HKKLGINEPKH

SEQ ID NO: 2288 - protein, 11 aa, Artificial
  IGFBP-2 heparin binding domain-containing peptide sequence
KRKLGINEPKH

SEQ ID NO: 2289 - protein, 11 aa, Artificial
  IGFBP-2 heparin binding domain-containing peptide sequence
RRKLGINEPKH

SEQ ID NO: 2290 - protein, 11 aa, Artificial
  IGFBP-2 heparin binding domain-containing peptide sequence
HRKLGINEPKH

SEQ ID NO: 2291 - protein, 11 aa, Artificial
  IGFBP-2 heparin binding domain-containing peptide sequence
KHRLGINEPKH

SEQ ID NO: 2292 - protein, 11 aa, Artificial
  IGFBP-2 heparin binding domain-containing peptide sequence
RHRLGINEPKH

SEQ ID NO: 2293 - protein, 11 aa, Artificial
  IGFBP-2 heparin binding domain-containing peptide sequence
HHRLGINEPKH

SEQ ID NO: 2294 - protein, 11 aa, Artificial
  IGFBP-2 heparin binding domain-containing peptide sequence
KKRLGINEPKH

SEQ ID NO: 2295 - protein, 11 aa, Artificial
  IGFBP-2 heparin binding domain-containing peptide sequence
RKRLGINEPKH

SEQ ID NO: 2296 - protein, 11 aa, Artificial
  IGFBP-2 heparin binding domain-containing peptide sequence
HKRLGINEPKH

SEQ ID NO: 2297 - protein, 11 aa, Artificial
  IGFBP-2 heparin binding domain-containing peptide sequence
KRRLGINEPKH

SEQ ID NO: 2298 - protein, 11 aa, Artificial
  IGFBP-2 heparin binding domain-containing peptide sequence
RRRLGINEPKH

SEQ ID NO: 2299 - protein, 11 aa, Artificial
  IGFBP-2 heparin binding domain-containing peptide sequence
HRRLGINEPKH

SEQ ID NO: 2300 - protein, 11 aa, Artificial
  IGFBP-2 heparin binding domain-containing peptide sequence
KHHIGIENPKH

SEQ ID NO: 2301 - protein, 11 aa, Artificial
  IGFBP-2 heparin binding domain-containing peptide sequence
RHHIGINEPKH

SEQ ID NO: 2302 - protein, 11 aa, Artificial
  IGFBP-2 heparin binding domain-containing peptide sequence
HHHIGINEPKH

SEQ ID NO: 2303 - protein, 11 aa, Artificial
  IGFBP-2 heparin binding domain-containing peptide sequence
KKHIGINEPKH

SEQ ID NO: 2304 - protein, 11 aa, Artificial
  IGFBP-2 heparin binding domain-containing peptide sequence
RKHIGINEPKH

SEQ ID NO: 2305 - protein, 11 aa, Artificial
  IGFBP-2 heparin binding domain-containing peptide sequence
HKHIGINEPKH

SEQ ID NO: 2306 - protein, 11 aa, Artificial
  IGFBP-2 heparin binding domain-containing peptide sequence
KRHIGINEPKH

SEQ ID NO: 2307 - protein, 11 aa, Artificial
  IGFBP-2 heparin binding domain-containing peptide sequence
RRHIGINEPKH

SEQ ID NO: 2308 - protein, 11 aa, Artificial
  IGFBP-2 heparin binding domain-containing peptide sequence
HRHIGINEPKH

SEQ ID NO: 2309 - protein, 11 aa, Artificial
  IGFBP-2 heparin binding domain-containing peptide sequence
KHKIGINEPKH

SEQ ID NO: 2310 - protein, 11 aa, Artificial
  IGFBP-2 heparin binding domain-containing peptide sequence
RHKIGINEPKH

SEQ ID NO: 2311 - protein, 11 aa, Artificial
  IGFBP-2 heparin binding domain-containing peptide sequence
HHKIGINEPKH

SEQ ID NO: 2312 - protein, 11 aa, Artificial
  IGFBP-2 heparin binding domain-containing peptide sequence
KKKIGINEPKH

SEQ ID NO: 2313 - protein, 11 aa, Artificial
  IGFBP-2 heparin binding domain-containing peptide sequence
RKKIGINEPKH

SEQ ID NO: 2314 - protein, 11 aa, Artificial
  IGFBP-2 heparin binding domain-containing peptide sequence
HKKIGINEPKH

SEQ ID NO: 2315 - protein, 11 aa, Artificial
  IGFBP-2 heparin binding domain-containing peptide sequence
KRKIGINEPKH

SEQ ID NO: 2316 - protein, 11 aa, Artificial
  IGFBP-2 heparin binding domain-containing peptide sequence
RRKIGINEPKH

SEQ ID NO: 2317 - protein, 11 aa, Artificial
  IGFBP-2 heparin binding domain-containing peptide sequence
HRKIGINEPKH

SEQ ID NO: 2318 - protein, 11 aa, Artificial
  IGFBP-2 heparin binding domain-containing peptide sequence
KHRIGINEPKH

SEQ ID NO: 2319 - protein, 11 aa, Artificial
  IGFBP-2 heparin binding domain-containing peptide sequence
RHRIGINEPKH

SEQ ID NO: 2320 - protein, 11 aa, Artificial
  IGFBP-2 heparin binding domain-containing peptide sequence
HHRIGINEPKH

SEQ ID NO: 2321 - protein, 11 aa, Artificial
  IGFBP-2 heparin binding domain-containing peptide sequence
KKRIGINEPKH

SEQ ID NO: 2322 - protein, 11 aa, Artificial
  IGFBP-2 heparin binding domain-containing peptide sequence
RKRIGINEPKH

SEQ ID NO: 2323 - protein, 11 aa, Artificial
  IGFBP-2 heparin binding domain-containing peptide sequence
HKRIGINEPKH

SEQ ID NO: 2324 - protein, 11 aa, Artificial
  IGFBP-2 heparin binding domain-containing peptide sequence
KRRIGINEPKH

SEQ ID NO: 2325 - protein, 11 aa, Artificial
  IGFBP-2 heparin binding domain-containing peptide sequence
RRRIGINEPKH

SEQ ID NO: 2326 - protein, 11 aa, Artificial
  IGFBP-2 heparin binding domain-containing peptide sequence
HRRIGINEPKH

SEQ ID NO: 2327 - protein, 11 aa, Artificial
  IGFBP-2 heparin binding domain-containing peptide sequence
KHHVGINEPKH

SEQ ID NO: 2328 - protein, 11 aa, Artificial
  IGFBP-2 heparin binding domain-containing peptide sequence
RHHVGINEPKH

SEQ ID NO: 2329 - protein, 11 aa, Artificial
  IGFBP-2 heparin binding domain-containing peptide sequence
HHHVGINEPKH

SEQ ID NO: 2330 - protein, 11 aa, Artificial
  IGFBP-2 heparin binding domain-containing peptide sequence
KKHVGINEPKH

SEQ ID NO: 2331 - protein, 11 aa, Artificial
  IGFBP-2 heparin binding domain-containing peptide sequence
RKHVGINEPKH

SEQ ID NO: 2332 - protein, 11 aa, Artificial
  IGFBP-2 heparin binding domain-containing peptide sequence
HKHVGINEPKH

SEQ ID NO: 2333 - protein, 11 aa, Artificial
  IGFBP-2 heparin binding domain-containing peptide sequence
KRHVGINEPKH

SEQ ID NO: 2334 - protein, 11 aa, Artificial
  IGFBP-2 heparin binding domain-containing peptide sequence
RRHVGINEPKH

SEQ ID NO: 2335 - protein, 11 aa, Artificial
  IGFBP-2 heparin binding domain-containing peptide sequence
HRHVGINEPKH

SEQ ID NO: 2336 - protein, 11 aa, Artificial
  IGFBP-2 heparin binding domain-containing peptide sequence
KHKVGINEPKH

SEQ ID NO: 2337 - protein, 11 aa, Artificial
  IGFBP-2 heparin binding domain-containing peptide sequence
RHKVGINEPKH

SEQ ID NO: 2338 - protein, 11 aa, Artificial
  IGFBP-2 heparin binding domain-containing peptide sequence
HHKVGINEPKH

SEQ ID NO: 2339 - protein, 11 aa, Artificial
  IGFBP-2 heparin binding domain-containing peptide sequence
KKKVGINEPKH

SEQ ID NO: 2340 - protein, 11 aa, Artificial
  IGFBP-2 heparin binding domain-containing peptide sequence
RKKVGINEPKH

SEQ ID NO: 2341 - protein, 11 aa, Artificial
  IGFBP-2 heparin binding domain-containing peptide sequence
HKKVGINEPKH

SEQ ID NO: 2342 - protein, 11 aa, Artificial
  IGFBP-2 heparin binding domain-containing peptide sequence
KRKVGINEPKH

SEQ ID NO: 2343 - protein, 11 aa, Artificial
  IGFBP-2 heparin binding domain-containing peptide sequence
RRKVGINEPKH

SEQ ID NO: 2344 - protein, 11 aa, Artificial
  IGFBP-2 heparin binding domain-containing peptide sequence
HRKVGINEPKH

SEQ ID NO: 2345 - protein, 11 aa, Artificial
  IGFBP-2 heparin binding domain-containing peptide sequence
KHRVGINEPKH

SEQ ID NO: 2346 - protein, 11 aa, Artificial
  IGFBP-2 heparin binding domain-containing peptide sequence
RHRVGINEPKH

SEQ ID NO: 2347 - protein, 11 aa, Artificial
  IGFBP-2 heparin binding domain-containing peptide sequence
HHRVGINEPKH

SEQ ID NO: 2348 - protein, 11 aa, Artificial
  IGFBP-2 heparin binding domain-containing peptide sequence
KKRVGINEPKH

SEQ ID NO: 2349 - protein, 11 aa, Artificial
  IGFBP-2 heparin binding domain-containing peptide sequence
RKRVGINEPKH

SEQ ID NO: 2350 - protein, 11 aa, Artificial
  IGFBP-2 heparin binding domain-containing peptide sequence
HKRVGINEPKH

SEQ ID NO: 2351 - protein, 11 aa, Artificial
  IGFBP-2 heparin binding domain-containing peptide sequence
KRRVGINEPKH

SEQ ID NO: 2352 - protein, 11 aa, Artificial
  IGFBP-2 heparin binding domain-containing peptide sequence
RRRVGINEPKH

SEQ ID NO: 2353 - protein, 11 aa, Artificial
  IGFBP-2 heparin binding domain-containing peptide sequence
HRRVGINEPKH

SEQ ID NO: 2354 - protein, 11 aa, Artificial
  IGFBP-2 heparin binding domain-containing peptide sequence
KHHLGVNEPKH

SEQ ID NO: 2355 - protein, 11 aa, Artificial
  IGFBP-2 heparin binding domain-containing peptide sequence
RHHLGVNEPKH

SEQ ID NO: 2356 - protein, 11 aa, Artificial
  IGFBP-2 heparin binding domain-containing peptide sequence
HHHLGVNEPKH

SEQ ID NO: 2357 - protein, 11 aa, Artificial
  IGFBP-2 heparin binding domain-containing peptide sequence
KKHLGVNEPKH

SEQ ID NO: 2358 - protein, 11 aa, Artificial
  IGFBP-2 heparin binding domain-containing peptide sequence
RKHLGVNEPKH

SEQ ID NO: 2359 - protein, 11 aa, Artificial
  IGFBP-2 heparin binding domain-containing peptide sequence
HKHLGVNEPKH

SEQ ID NO: 2360 - protein, 11 aa, Artificial
  IGFBP-2 heparin binding domain-containing peptide sequence
KRHLGVNEPKH

SEQ ID NO: 2361 - protein, 11 aa, Artificial
  IGFBP-2 heparin binding domain-containing peptide sequence
RRHLGVNEPKH

SEQ ID NO: 2362 - protein, 11 aa, Artificial
  IGFBP-2 heparin binding domain-containing peptide sequence
HRHLGVNEPKH

SEQ ID NO: 2363 - protein, 11 aa, Artificial
  IGFBP-2 heparin binding domain-containing peptide sequence
KHKLGVNEPKH

SEQ ID NO: 2364 - protein, 11 aa, Artificial
  IGFBP-2 heparin binding domain-containing peptide sequence
RHKLGVNEPKH

SEQ ID NO: 2365 - protein, 11 aa, Artificial
  IGFBP-2 heparin binding domain-containing peptide sequence
HHKLGVNEPKH

SEQ ID NO: 2366 - protein, 11 aa, Artificial
  IGFBP-2 heparin binding domain-containing peptide sequence
KKKLGVNEPKH

SEQ ID NO: 2367 - protein, 11 aa, Artificial
  IGFBP-2 heparin binding domain-containing peptide sequence
RKKLGVNEPKH

SEQ ID NO: 2368 - protein, 11 aa, Artificial
  IGFBP-2 heparin binding domain-containing peptide sequence
HKKLGVNEPKH

SEQ ID NO: 2369 - protein, 11 aa, Artificial
  IGFBP-2 heparin binding domain-containing peptide sequence
KRKLGVNEPKH

SEQ ID NO: 2370 - protein, 11 aa, Artificial
  IGFBP-2 heparin binding domain-containing peptide sequence
RRKLGVNEPKH

SEQ ID NO: 2371 - protein, 11 aa, Artificial
  IGFBP-2 heparin binding domain-containing peptide sequence
HRKLGVNEPKH

SEQ ID NO: 2372 - protein, 11 aa, Artificial
  IGFBP-2 heparin binding domain-containing peptide sequence
KHRLGVNEPKH

SEQ ID NO: 2373 - protein, 11 aa, Artificial
  IGFBP-2 heparin binding domain-containing peptide sequence
RHRLGVNEPKH

SEQ ID NO: 2374 - protein, 11 aa, Artificial
  IGFBP-2 heparin binding domain-containing peptide sequence
HHRLGVNEPKH

SEQ ID NO: 2375 - protein, 11 aa, Artificial
  IGFBP-2 heparin binding domain-containing peptide sequence
KKRLGVNEPKH

SEQ ID NO: 2376 - protein, 11 aa, Artificial
  IGFBP-2 heparin binding domain-containing peptide sequence
RKRLGVNEPKH

SEQ ID NO: 2377 - protein, 11 aa, Artificial
  IGFBP-2 heparin binding domain-containing peptide sequence
HKRLGVNEPKH

SEQ ID NO: 2378 - protein, 11 aa, Artificial
  IGFBP-2 heparin binding domain-containing peptide sequence
KRRLGVNEPKH

SEQ ID NO: 2379 - protein, 11 aa, Artificial
  IGFBP-2 heparin binding domain-containing peptide sequence
RRRLGVNEPKH

SEQ ID NO: 2380 - protein, 11 aa, Artificial
  IGFBP-2 heparin binding domain-containing peptide sequence
HRRLGVNEPKH

SEQ ID NO: 2381 - protein, 11 aa, Artificial
  IGFBP-2 heparin binding domain-containing peptide sequence
KHHIGVNEPKH

SEQ ID NO: 2382 - protein, 11 aa, Artificial
  IGFBP-2 heparin binding domain-containing peptide sequence
RHHIGVNEPKH

SEQ ID NO: 2383 - protein, 11 aa, Artificial
  IGFBP-2 heparin binding domain-containing peptide sequence
HHHIGVNEPKH

SEQ ID NO: 2384 - protein, 11 aa, Artificial
  IGFBP-2 heparin binding domain-containing peptide sequence
KKHIGVNEPKH

SEQ ID NO: 2385 - protein, 11 aa, Artificial
  IGFBP-2 heparin binding domain-containing peptide sequence
RKHIGVNEPKH

SEQ ID NO: 2386 - protein, 11 aa, Artificial
  IGFBP-2 heparin binding domain-containing peptide sequence
HKHIGVNEPKH

SEQ ID NO: 2387 - protein, 11 aa, Artificial
  IGFBP-2 heparin binding domain-containing peptide sequence
KRHIGVNEPKH

SEQ ID NO: 2388 - protein, 11 aa, Artificial
  IGFBP-2 heparin binding domain-containing peptide sequence
RRHIGVNEPKH

SEQ ID NO: 2389 - protein, 11 aa, Artificial
  IGFBP-2 heparin binding domain-containing peptide sequence
HRHIGVNEPKH

SEQ ID NO: 2390 - protein, 11 aa, Artificial
  IGFBP-2 heparin binding domain-containing peptide sequence
KHKIGVNEPKH

SEQ ID NO: 2391 - protein, 11 aa, Artificial
  IGFBP-2 heparin binding domain-containing peptide sequence
RHKIGVNEPKH

SEQ ID NO: 2392 - protein, 11 aa, Artificial
  IGFBP-2 heparin binding domain-containing peptide sequence
HHKIGVNEPKH

SEQ ID NO: 2393 - protein, 11 aa, Artificial
  IGFBP-2 heparin binding domain-containing peptide sequence
KKKIGVNEPKH

SEQ ID NO: 2394 - protein, 11 aa, Artificial
  IGFBP-2 heparin binding domain-containing peptide sequence
RKKIGVNEPKH

SEQ ID NO: 2395 - protein, 11 aa, Artificial
  IGFBP-2 heparin binding domain-containing peptide sequence
HKKIGVNEPKH

SEQ ID NO: 2396 - protein, 11 aa, Artificial
  IGFBP-2 heparin binding domain-containing peptide sequence
KRKIGVNEPKH

SEQ ID NO: 2397 - protein, 11 aa, Artificial
  IGFBP-2 heparin binding domain-containing peptide sequence
RRKIGVNEPKH

SEQ ID NO: 2398 - protein, 11 aa, Artificial
  IGFBP-2 heparin binding domain-containing peptide sequence
HRKIGVNEPKH

SEQ ID NO: 2399 - protein, 11 aa, Artificial
  IGFBP-2 heparin binding domain-containing peptide sequence
KHRIGVNEPKH

SEQ ID NO: 2400 - protein, 11 aa, Artificial
  IGFBP-2 heparin binding domain-containing peptide sequence
RHRIGVNEPKH

SEQ ID NO: 2401 - protein, 11 aa, Artificial
  IGFBP-2 heparin binding domain-containing peptide sequence
HHRIGVNEPKH

SEQ ID NO: 2402 - protein, 11 aa, Artificial
  IGFBP-2 heparin binding domain-containing peptide sequence
KKRIGVNEPKH

SEQ ID NO: 2403 - protein, 11 aa, Artificial
  IGFBP-2 heparin binding domain-containing peptide sequence
RKRIGVNEPKH

SEQ ID NO: 2404 - protein, 11 aa, Artificial
  IGFBP-2 heparin binding domain-containing peptide sequence
HKRIGVNEPKH

SEQ ID NO: 2405 - protein, 11 aa, Artificial
  IGFBP-2 heparin binding domain-containing peptide sequence
KRRIGVNEPKH

SEQ ID NO: 2406 - protein, 11 aa, Artificial
  IGFBP-2 heparin binding domain-containing peptide sequence
RRRIGVNEPKH

SEQ ID NO: 2407 - protein, 11 aa, Artificial
  IGFBP-2 heparin binding domain-containing peptide sequence
HRRIGVNEPKH

SEQ ID NO: 2408 - protein, 11 aa, Artificial
  IGFBP-2 heparin binding domain-containing peptide sequence
KHHVGVNEPKH

SEQ ID NO: 2409 - protein, 11 aa, Artificial
  IGFBP-2 heparin binding domain-containing peptide sequence
RHHVGVNEPKH

SEQ ID NO: 2410 - protein, 11 aa, Artificial
  IGFBP-2 heparin binding domain-containing peptide sequence
HHHVGVNEPKH

SEQ ID NO: 2411 - protein, 11 aa, Artificial
  IGFBP-2 heparin binding domain-containing peptide sequence
KKHVGVNEPKH

SEQ ID NO: 2412 - protein, 11 aa, Artificial
  IGFBP-2 heparin binding domain-containing peptide sequence
RKHVGVNEPKH

SEQ ID NO: 2413 - protein, 11 aa, Artificial
  IGFBP-2 heparin binding domain-containing peptide sequence
HKHVGVNEPKH

SEQ ID NO: 2414 - protein, 11 aa, Artificial
  IGFBP-2 heparin binding domain-containing peptide sequence
KRHVGVNEPKH

SEQ ID NO: 2415 - protein, 11 aa, Artificial
  IGFBP-2 heparin binding domain-containing peptide sequence
RRHVGVNEPKH

SEQ ID NO: 2416 - protein, 11 aa, Artificial
  IGFBP-2 heparin binding domain-containing peptide sequence
HRHVGVNEPKH

SEQ ID NO: 2417 - protein, 11 aa, Artificial
  IGFBP-2 heparin binding domain-containing peptide sequence
KHKVGVNEPKH

SEQ ID NO: 2418 - protein, 11 aa, Artificial
  IGFBP-2 heparin binding domain-containing peptide sequence
RHKVGVNEPKH

SEQ ID NO: 2419 - protein, 11 aa, Artificial
  IGFBP-2 heparin binding domain-containing peptide sequence
HHKVGVNEPKH

SEQ ID NO: 2420 - protein, 11 aa, Artificial
  IGFBP-2 heparin binding domain-containing peptide sequence
KKKVGVNEPKH

SEQ ID NO: 2421 - protein, 11 aa, Artificial
  IGFBP-2 heparin binding domain-containing peptide sequence
RKKVGVNEPKH

SEQ ID NO: 2422 - protein, 11 aa, Artificial
  IGFBP-2 heparin binding domain-containing peptide sequence
HKKVGVNEPKH

SEQ ID NO: 2423 - protein, 11 aa, Artificial
  IGFBP-2 heparin binding domain-containing peptide sequence
KRKVGVNEPKH

SEQ ID NO: 2424 - protein, 11 aa, Artificial
  IGFBP-2 heparin binding domain-containing peptide sequence
RRKVGVNEPKH

SEQ ID NO: 2425 - protein, 11 aa, Artificial
  IGFBP-2 heparin binding domain-containing peptide sequence
HRKVGVNEPKH

SEQ ID NO: 2426 - protein, 11 aa, Artificial
  IGFBP-2 heparin binding domain-containing peptide sequence
KHRVGVNEPKH

SEQ ID NO: 2427 - protein, 11 aa, Artificial
  IGFBP-2 heparin binding domain-containing peptide sequence
RHRVGVNEPKH

SEQ ID NO: 2428 - protein, 11 aa, Artificial
  IGFBP-2 heparin binding domain-containing peptide sequence
HHRVGVNEPKH

SEQ ID NO: 2429 - protein, 11 aa, Artificial
  IGFBP-2 heparin binding domain-containing peptide sequence
KKRVGVNEPKH

SEQ ID NO: 2430 - protein, 11 aa, Artificial
  IGFBP-2 heparin binding domain-containing peptide sequence
RKRVGVNEPKH

SEQ ID NO: 2431 - protein, 11 aa, Artificial
  IGFBP-2 heparin binding domain-containing peptide sequence
HKRVGVNEPKH

SEQ ID NO: 2432 - protein, 11 aa, Artificial
  IGFBP-2 heparin binding domain-containing peptide sequence
KRRVGVNEPKH

SEQ ID NO: 2433 - protein, 11 aa, Artificial
  IGFBP-2 heparin binding domain-containing peptide sequence
RRRVGVNEPKH

SEQ ID NO: 2434 - protein, 11 aa, Artificial
  IGFBP-2 heparin binding domain-containing peptide sequence
HRRVGVNEPKH

SEQ ID NO: 2435 - protein, 11 aa, Artificial
  IGFBP-2 heparin binding domain-containing peptide sequence
KHHLGLENPKH

SEQ ID NO: 2436 - protein, 11 aa, Artificial
  IGFBP-2 heparin binding domain-containing peptide sequence
RHHLGLENPKH

SEQ ID NO: 2437 - protein, 11 aa, Artificial
  IGFBP-2 heparin binding domain-containing peptide sequence
HHHLGLENPKH

SEQ ID NO: 2438 - protein, 11 aa, Artificial
  IGFBP-2 heparin binding domain-containing peptide sequence
KKHLGLENPKH

SEQ ID NO: 2439 - protein, 11 aa, Artificial
  IGFBP-2 heparin binding domain-containing peptide sequence
RKHLGLENPKH

SEQ ID NO: 2440 - protein, 11 aa, Artificial
  IGFBP-2 heparin binding domain-containing peptide sequence
HKHLGLENPKH

SEQ ID NO: 2441 - protein, 11 aa, Artificial
  IGFBP-2 heparin binding domain-containing peptide sequence
KRHLGLENPKH

SEQ ID NO: 2442 - protein, 11 aa, Artificial
  IGFBP-2 heparin binding domain-containing peptide sequence
RRHLGLENPKH

SEQ ID NO: 2443 - protein, 11 aa, Artificial
  IGFBP-2 heparin binding domain-containing peptide sequence
HRHLGLENPKH

SEQ ID NO: 2444 - protein, 11 aa, Artificial
  IGFBP-2 heparin binding domain-containing peptide sequence
KHKLGLENPKH

SEQ ID NO: 2445 - protein, 11 aa, Artificial
  IGFBP-2 heparin binding domain-containing peptide sequence
RHKLGLENPKH

SEQ ID NO: 2446 - protein, 11 aa, Artificial
  IGFBP-2 heparin binding domain-containing peptide sequence
HHKLGLENPKH

SEQ ID NO: 2447 - protein, 11 aa, Artificial
  IGFBP-2 heparin binding domain-containing peptide sequence
KKKLGLENPKH

SEQ ID NO: 2448 - protein, 11 aa, Artificial
  IGFBP-2 heparin binding domain-containing peptide sequence
RKKLGLENPKH

SEQ ID NO: 2449 - protein, 11 aa, Artificial
  IGFBP-2 heparin binding domain-containing peptide sequence
HKKLGLENPKH

SEQ ID NO: 2450 - protein, 11 aa, Artificial
  IGFBP-2 heparin binding domain-containing peptide sequence
KRKLGLENPKH

SEQ ID NO: 2451 - protein, 11 aa, Artificial
  IGFBP-2 heparin binding domain-containing peptide sequence
RRKLGLENPKH

SEQ ID NO: 2452 - protein, 11 aa, Artificial
  IGFBP-2 heparin binding domain-containing peptide sequence
HRKLGLENPKH

SEQ ID NO: 2453 - protein, 11 aa, Artificial
  IGFBP-2 heparin binding domain-containing peptide sequence
KHRLGLENPKH

SEQ ID NO: 2454 - protein, 11 aa, Artificial
  IGFBP-2 heparin binding domain-containing peptide sequence
RHRLGLENPKH

SEQ ID NO: 2455 - protein, 11 aa, Artificial
  IGFBP-2 heparin binding domain-containing peptide sequence
HHRLGLENPKH

SEQ ID NO: 2456 - protein, 11 aa, Artificial
  IGFBP-2 heparin binding domain-containing peptide sequence
KKRLGLENPKH

SEQ ID NO: 2457 - protein, 11 aa, Artificial
  IGFBP-2 heparin binding domain-containing peptide sequence
RKRLGLENPKH

SEQ ID NO: 2458 - protein, 11 aa, Artificial
  IGFBP-2 heparin binding domain-containing peptide sequence
HKRLGLENPKH

SEQ ID NO: 2459 - protein, 11 aa, Artificial
  IGFBP-2 heparin binding domain-containing peptide sequence
KRRLGLENPKH

SEQ ID NO: 2460 - protein, 11 aa, Artificial
  IGFBP-2 heparin binding domain-containing peptide sequence
RRRLGLENPKH

SEQ ID NO: 2461 - protein, 11 aa, Artificial
  IGFBP-2 heparin binding domain-containing peptide sequence
HRRLGLENPKH

SEQ ID NO: 2462 - protein, 11 aa, Artificial
  IGFBP-2 heparin binding domain-containing peptide sequence
KHHIGLENPKH

SEQ ID NO: 2463 - protein, 11 aa, Artificial
  IGFBP-2 heparin binding domain-containing peptide sequence
RHHIGLENPKH

SEQ ID NO: 2464 - protein, 11 aa, Artificial
  IGFBP-2 heparin binding domain-containing peptide sequence
HHHIGLENPKH

SEQ ID NO: 2465 - protein, 11 aa, Artificial
  IGFBP-2 heparin binding domain-containing peptide sequence
KKHIGLENPKH

SEQ ID NO: 2466 - protein, 11 aa, Artificial
  IGFBP-2 heparin binding domain-containing peptide sequence
RKHIGLENPKH

SEQ ID NO: 2467 - protein, 11 aa, Artificial
  IGFBP-2 heparin binding domain-containing peptide sequence
HKHIGLENPKH

SEQ ID NO: 2468 - protein, 11 aa, Artificial
  IGFBP-2 heparin binding domain-containing peptide sequence
KRHIGLENPKH

SEQ ID NO: 2469 - protein, 11 aa, Artificial
  IGFBP-2 heparin binding domain-containing peptide sequence
RRHIGLENPKH

SEQ ID NO: 2470 - protein, 11 aa, Artificial
  IGFBP-2 heparin binding domain-containing peptide sequence
HRHIGLENPKH

SEQ ID NO: 2471 - protein, 11 aa, Artificial
  IGFBP-2 heparin binding domain-containing peptide sequence
KHKIGLENPKH

SEQ ID NO: 2472 - protein, 11 aa, Artificial
  IGFBP-2 heparin binding domain-containing peptide sequence
RHKIGLENPKH

SEQ ID NO: 2473 - protein, 11 aa, Artificial
  IGFBP-2 heparin binding domain-containing peptide sequence
HHKIGLENPKH

SEQ ID NO: 2474 - protein, 11 aa, Artificial
  IGFBP-2 heparin binding domain-containing peptide sequence
KKKIGLENPKH

SEQ ID NO: 2475 - protein, 11 aa, Artificial
  IGFBP-2 heparin binding domain-containing peptide sequence
RKKIGLENPKH

SEQ ID NO: 2476 - protein, 11 aa, Artificial
  IGFBP-2 heparin binding domain-containing peptide sequence
HKKIGLENPKH

SEQ ID NO: 2477 - protein, 11 aa, Artificial
  IGFBP-2 heparin binding domain-containing peptide sequence
KRKIGLENPKH

SEQ ID NO: 2478 - protein, 11 aa, Artificial
  IGFBP-2 heparin binding domain-containing peptide sequence
RRKIGLENPKH

SEQ ID NO: 2479 - protein, 11 aa, Artificial
  IGFBP-2 heparin binding domain-containing peptide sequence
HRKIGLENPKH

SEQ ID NO: 2480 - protein, 11 aa, Artificial
  IGFBP-2 heparin binding domain-containing peptide sequence
KHRIGLENPKH

SEQ ID NO: 2481 - protein, 11 aa, Artificial
  IGFBP-2 heparin binding domain-containing peptide sequence
RHRIGLENPKH

SEQ ID NO: 2482 - protein, 11 aa, Artificial
  IGFBP-2 heparin binding domain-containing peptide sequence
HHRIGLENPKH

SEQ ID NO: 2483 - protein, 11 aa, Artificial
  IGFBP-2 heparin binding domain-containing peptide sequence
KKRIGLENPKH

SEQ ID NO: 2484 - protein, 11 aa, Artificial
  IGFBP-2 heparin binding domain-containing peptide sequence
RKRIGLENPKH

SEQ ID NO: 2485 - protein, 11 aa, Artificial
  IGFBP-2 heparin binding domain-containing peptide sequence
HKRIGLENPKH

SEQ ID NO: 2486 - protein, 11 aa, Artificial
  IGFBP-2 heparin binding domain-containing peptide sequence
KRRIGLENPKH

SEQ ID NO: 2487 - protein, 11 aa, Artificial
  IGFBP-2 heparin binding domain-containing peptide sequence
RRRIGLENPKH

SEQ ID NO: 2488 - protein, 11 aa, Artificial
  IGFBP-2 heparin binding domain-containing peptide sequence
HRRIGLENPKH

SEQ ID NO: 2489 - protein, 11 aa, Artificial
  IGFBP-2 heparin binding domain-containing peptide sequence
KHHVGLENPKH

SEQ ID NO: 2490 - protein, 11 aa, Artificial
  IGFBP-2 heparin binding domain-containing peptide sequence
RHHVGLENPKH

SEQ ID NO: 2491 - protein, 11 aa, Artificial
  IGFBP-2 heparin binding domain-containing peptide sequence
HHHVGLENPKH

SEQ ID NO: 2492 - protein, 11 aa, Artificial
  IGFBP-2 heparin binding domain-containing peptide sequence
KKHVGLENPKH

SEQ ID NO: 2493 - protein, 11 aa, Artificial
  IGFBP-2 heparin binding domain-containing peptide sequence
RKHVGLENPKH

SEQ ID NO: 2494 - protein, 11 aa, Artificial
  IGFBP-2 heparin binding domain-containing peptide sequence
HKHVGLENPKH

SEQ ID NO: 2495 - protein, 11 aa, Artificial
  IGFBP-2 heparin binding domain-containing peptide sequence
KRHVGLENPKH

SEQ ID NO: 2496 - protein, 11 aa, Artificial
  IGFBP-2 heparin binding domain-containing peptide sequence
RRHVGLENPKH

SEQ ID NO: 2497 - protein, 11 aa, Artificial
  IGFBP-2 heparin binding domain-containing peptide sequence
HRHVGLENPKH

SEQ ID NO: 2498 - protein, 11 aa, Artificial
  IGFBP-2 heparin binding domain-containing peptide sequence
KHKVGLENPKH

SEQ ID NO: 2499 - protein, 11 aa, Artificial
  IGFBP-2 heparin binding domain-containing peptide sequence
RHKVGLENPKH

SEQ ID NO: 2500 - protein, 11 aa, Artificial
  IGFBP-2 heparin binding domain-containing peptide sequence
HHKVGLENPKH

SEQ ID NO: 2501 - protein, 11 aa, Artificial
  IGFBP-2 heparin binding domain-containing peptide sequence
KKKVGLENPKH

SEQ ID NO: 2502 - protein, 11 aa, Artificial
  IGFBP-2 heparin binding domain-containing peptide sequence
RKKVGLENPKH

SEQ ID NO: 2503 - protein, 11 aa, Artificial
  IGFBP-2 heparin binding domain-containing peptide sequence
HKKVGLENPKH

SEQ ID NO: 2504 - protein, 11 aa, Artificial
  IGFBP-2 heparin binding domain-containing peptide sequence
KRKVGLENPKH

SEQ ID NO: 2505 - protein, 11 aa, Artificial
  IGFBP-2 heparin binding domain-containing peptide sequence
RRKVGLENPKH

SEQ ID NO: 2506 - protein, 11 aa, Artificial
  IGFBP-2 heparin binding domain-containing peptide sequence
HRKVGLENPKH

SEQ ID NO: 2507 - protein, 11 aa, Artificial
  IGFBP-2 heparin binding domain-containing peptide sequence
KHRVGLENPKH

SEQ ID NO: 2508 - protein, 11 aa, Artificial
  IGFBP-2 heparin binding domain-containing peptide sequence
RHRVGLENPKH

SEQ ID NO: 2509 - protein, 11 aa, Artificial
  IGFBP-2 heparin binding domain-containing peptide sequence
HHRVGLENPKH

SEQ ID NO: 2510 - protein, 11 aa, Artificial
  IGFBP-2 heparin binding domain-containing peptide sequence
KKRVGLENPKH

SEQ ID NO: 2511 - protein, 11 aa, Artificial
  IGFBP-2 heparin binding domain-containing peptide sequence
RKRVGLENPKH

SEQ ID NO: 2512 - protein, 11 aa, Artificial
  IGFBP-2 heparin binding domain-containing peptide sequence
HKRVGLENPKH

SEQ ID NO: 2513 - protein, 11 aa, Artificial
  IGFBP-2 heparin binding domain-containing peptide sequence
KRRVGLENPKH

SEQ ID NO: 2514 - protein, 11 aa, Artificial
  IGFBP-2 heparin binding domain-containing peptide sequence
RRRVGLENPKH

SEQ ID NO: 2515 - protein, 11 aa, Artificial
  IGFBP-2 heparin binding domain-containing peptide sequence
HRRVGLENPKH

SEQ ID NO: 2516 - protein, 11 aa, Artificial
  IGFBP-2 heparin binding domain-containing peptide sequence
KHHLGIENPKH

SEQ ID NO: 2517 - protein, 11 aa, Artificial
  IGFBP-2 heparin binding domain-containing peptide sequence
RHHLGIENPKH

SEQ ID NO: 2518 - protein, 11 aa, Artificial
  IGFBP-2 heparin binding domain-containing peptide sequence
HHHLGIENPKH

SEQ ID NO: 2519 - protein, 11 aa, Artificial
  IGFBP-2 heparin binding domain-containing peptide sequence
KKHLGIENPKH

SEQ ID NO: 2520 - protein, 11 aa, Artificial
  IGFBP-2 heparin binding domain-containing peptide sequence
RKHLGIENPKH

SEQ ID NO: 2521 - protein, 11 aa, Artificial
  IGFBP-2 heparin binding domain-containing peptide sequence
HKHLGIENPKH

SEQ ID NO: 2522 - protein, 11 aa, Artificial
  IGFBP-2 heparin binding domain-containing peptide sequence
KRHLGIENPKH

SEQ ID NO: 2523 - protein, 11 aa, Artificial
  IGFBP-2 heparin binding domain-containing peptide sequence
RRHLGIENPKH

SEQ ID NO: 2524 - protein, 11 aa, Artificial
  IGFBP-2 heparin binding domain-containing peptide sequence
HRHLGIENPKH

SEQ ID NO: 2525 - protein, 11 aa, Artificial
  IGFBP-2 heparin binding domain-containing peptide sequence
KHKLGIENPKH

SEQ ID NO: 2526 - protein, 11 aa, Artificial
  IGFBP-2 heparin binding domain-containing peptide sequence
RHKLGIENPKH

SEQ ID NO: 2527 - protein, 11 aa, Artificial
  IGFBP-2 heparin binding domain-containing peptide sequence
HHKLGIENPKH

SEQ ID NO: 2528 - protein, 11 aa, Artificial
  IGFBP-2 heparin binding domain-containing peptide sequence
KKKLGIENPKH

SEQ ID NO: 2529 - protein, 11 aa, Artificial
  IGFBP-2 heparin binding domain-containing peptide sequence
RKKLGIENPKH

SEQ ID NO: 2530 - protein, 11 aa, Artificial
  IGFBP-2 heparin binding domain-containing peptide sequence
HKKLGIENPKH

SEQ ID NO: 2531 - protein, 11 aa, Artificial
  IGFBP-2 heparin binding domain-containing peptide sequence
KRKLGIENPKH

SEQ ID NO: 2532 - protein, 11 aa, Artificial
  IGFBP-2 heparin binding domain-containing peptide sequence
RRKLGIENPKH

SEQ ID NO: 2533 - protein, 11 aa, Artificial
  IGFBP-2 heparin binding domain-containing peptide sequence
HRKLGIENPKH

SEQ ID NO: 2534 - protein, 11 aa, Artificial
  IGFBP-2 heparin binding domain-containing peptide sequence
KHRLGIENPKH

SEQ ID NO: 2535 - protein, 11 aa, Artificial
  IGFBP-2 heparin binding domain-containing peptide sequence
RHRLGIENPKH

SEQ ID NO: 2536 - protein, 11 aa, Artificial
  IGFBP-2 heparin binding domain-containing peptide sequence
HHRLGIENPKH

SEQ ID NO: 2537 - protein, 11 aa, Artificial
  IGFBP-2 heparin binding domain-containing peptide sequence
KKRLGIENPKH

SEQ ID NO: 2538 - protein, 11 aa, Artificial
  IGFBP-2 heparin binding domain-containing peptide sequence
RKRLGIENPKH

SEQ ID NO: 2539 - protein, 11 aa, Artificial
  IGFBP-2 heparin binding domain-containing peptide sequence
HKRLGIENPKH

SEQ ID NO: 2540 - protein, 11 aa, Artificial
  IGFBP-2 heparin binding domain-containing peptide sequence
KRRLGIENPKH

SEQ ID NO: 2541 - protein, 11 aa, Artificial
  IGFBP-2 heparin binding domain-containing peptide sequence
RRRLGIENPKH

SEQ ID NO: 2542 - protein, 11 aa, Artificial
  IGFBP-2 heparin binding domain-containing peptide sequence
HRRLGIENPKH

SEQ ID NO: 2543 - protein, 11 aa, Artificial
  IGFBP-2 heparin binding domain-containing peptide sequence
KHHIGIENPKH

SEQ ID NO: 2544 - protein, 11 aa, Artificial
  IGFBP-2 heparin binding domain-containing peptide sequence
RHHIGIENPKH

SEQ ID NO: 2545 - protein, 11 aa, Artificial
  IGFBP-2 heparin binding domain-containing peptide sequence
HHHIGIENPKH

SEQ ID NO: 2546 - protein, 11 aa, Artificial
  IGFBP-2 heparin binding domain-containing peptide sequence
KKHIGIENPKH

SEQ ID NO: 2547 - protein, 11 aa, Artificial
  IGFBP-2 heparin binding domain-containing peptide sequence
RKHIGIENPKH

SEQ ID NO: 2548 - protein, 11 aa, Artificial
  IGFBP-2 heparin binding domain-containing peptide sequence
HKHIGIENPKH

SEQ ID NO: 2549 - protein, 11 aa, Artificial
  IGFBP-2 heparin binding domain-containing peptide sequence
KRHIGIENPKH

SEQ ID NO: 2550 - protein, 11 aa, Artificial
  IGFBP-2 heparin binding domain-containing peptide sequence
RRHIGIENPKH

SEQ ID NO: 2551 - protein, 11 aa, Artificial
  IGFBP-2 heparin binding domain-containing peptide sequence
HRHIGIENPKH

SEQ ID NO: 2552 - protein, 11 aa, Artificial
  IGFBP-2 heparin binding domain-containing peptide sequence
KHKIGIENPKH

SEQ ID NO: 2553 - protein, 11 aa, Artificial
  IGFBP-2 heparin binding domain-containing peptide sequence
RHKIGIENPKH

SEQ ID NO: 2554 - protein, 11 aa, Artificial
  IGFBP-2 heparin binding domain-containing peptide sequence
HHKIGIENPKH

SEQ ID NO: 2555 - protein, 11 aa, Artificial
  IGFBP-2 heparin binding domain-containing peptide sequence
KKKIGIENPKH

SEQ ID NO: 2556 - protein, 11 aa, Artificial
  IGFBP-2 heparin binding domain-containing peptide sequence
RKKIGIENPKH

SEQ ID NO: 2557 - protein, 11 aa, Artificial
  IGFBP-2 heparin binding domain-containing peptide sequence
HKKIGIENPKH

SEQ ID NO: 2558 - protein, 11 aa, Artificial
  IGFBP-2 heparin binding domain-containing peptide sequence
KRKIGIENPKH

SEQ ID NO: 2559 - protein, 11 aa, Artificial
  IGFBP-2 heparin binding domain-containing peptide sequence
RRKIGIENPKH

SEQ ID NO: 2560 - protein, 11 aa, Artificial
  IGFBP-2 heparin binding domain-containing peptide sequence
HRKIGIENPKH

SEQ ID NO: 2561 - protein, 11 aa, Artificial
  IGFBP-2 heparin binding domain-containing peptide sequence
KHRIGIENPKH

SEQ ID NO: 2562 - protein, 11 aa, Artificial
  IGFBP-2 heparin binding domain-containing peptide sequence
RHRIGIENPKH

SEQ ID NO: 2563 - protein, 11 aa, Artificial
  IGFBP-2 heparin binding domain-containing peptide sequence
HHRIGIENPKH

SEQ ID NO: 2564 - protein, 11 aa, Artificial
  IGFBP-2 heparin binding domain-containing peptide sequence
KKRIGIENPKH

SEQ ID NO: 2565 - protein, 11 aa, Artificial
  IGFBP-2 heparin binding domain-containing peptide sequence
RKRIGIENPKH

SEQ ID NO: 2566 - protein, 11 aa, Artificial
  IGFBP-2 heparin binding domain-containing peptide sequence
HKRIGIENPKH

SEQ ID NO: 2567 - protein, 11 aa, Artificial
  IGFBP-2 heparin binding domain-containing peptide sequence
KRRIGIENPKH

SEQ ID NO: 2568 - protein, 11 aa, Artificial
  IGFBP-2 heparin binding domain-containing peptide sequence
RRRIGIENPKH

SEQ ID NO: 2569 - protein, 11 aa, Artificial
  IGFBP-2 heparin binding domain-containing peptide sequence
HRRIGIENPKH

SEQ ID NO: 2570 - protein, 11 aa, Artificial
  IGFBP-2 heparin binding domain-containing peptide sequence
KHHVGIENPKH

SEQ ID NO: 2571 - protein, 11 aa, Artificial
  IGFBP-2 heparin binding domain-containing peptide sequence
RHHVGIENPKH

SEQ ID NO: 2572 - protein, 11 aa, Artificial
  IGFBP-2 heparin binding domain-containing peptide sequence
HHHVGIENPKH

SEQ ID NO: 2573 - protein, 11 aa, Artificial
  IGFBP-2 heparin binding domain-containing peptide sequence
KKHVGIENPKH

SEQ ID NO: 2574 - protein, 11 aa, Artificial
  IGFBP-2 heparin binding domain-containing peptide sequence
RKHVGIENPKH

SEQ ID NO: 2575 - protein, 11 aa, Artificial
  IGFBP-2 heparin binding domain-containing peptide sequence
HKHVGIENPKH

SEQ ID NO: 2576 - protein, 11 aa, Artificial
  IGFBP-2 heparin binding domain-containing peptide sequence
KRHVGIENPKH

SEQ ID NO: 2577 - protein, 11 aa, Artificial
  IGFBP-2 heparin binding domain-containing peptide sequence
RRHVGIENPKH

SEQ ID NO: 2578 - protein, 11 aa, Artificial
  IGFBP-2 heparin binding domain-containing peptide sequence
HRHVGIENPKH

SEQ ID NO: 2579 - protein, 11 aa, Artificial
  IGFBP-2 heparin binding domain-containing peptide sequence
KHKVGIENPKH

SEQ ID NO: 2580 - protein, 11 aa, Artificial
  IGFBP-2 heparin binding domain-containing peptide sequence
RHKVGIENPKH

SEQ ID NO: 2581 - protein, 11 aa, Artificial
  IGFBP-2 heparin binding domain-containing peptide sequence
HHKVGIENPKH

SEQ ID NO: 2582 - protein, 11 aa, Artificial
  IGFBP-2 heparin binding domain-containing peptide sequence
KKKVGIENPKH

SEQ ID NO: 2583 - protein, 11 aa, Artificial
  IGFBP-2 heparin binding domain-containing peptide sequence
RKKVGIENPKH

SEQ ID NO: 2584 - protein, 11 aa, Artificial
  IGFBP-2 heparin binding domain-containing peptide sequence
HKKVGIENPKH

SEQ ID NO: 2585 - protein, 11 aa, Artificial
  IGFBP-2 heparin binding domain-containing peptide sequence
KRKVGIENPKH

SEQ ID NO: 2586 - protein, 11 aa, Artificial
  IGFBP-2 heparin binding domain-containing peptide sequence
RRKVGIENPKH

SEQ ID NO: 2587 - protein, 11 aa, Artificial
  IGFBP-2 heparin binding domain-containing peptide sequence
HRKVGIENPKH

SEQ ID NO: 2588 - protein, 11 aa, Artificial
  IGFBP-2 heparin binding domain-containing peptide sequence
KHRVGIENPKH

SEQ ID NO: 2589 - protein, 11 aa, Artificial
  IGFBP-2 heparin binding domain-containing peptide sequence
RHRVGIENPKH

SEQ ID NO: 2590 - protein, 11 aa, Artificial
  IGFBP-2 heparin binding domain-containing peptide sequence
HHRVGIENPKH

SEQ ID NO: 2591 - protein, 11 aa, Artificial
  IGFBP-2 heparin binding domain-containing peptide sequence
KKRVGIENPKH

SEQ ID NO: 2592 - protein, 11 aa, Artificial
  IGFBP-2 heparin binding domain-containing peptide sequence
RKRVGIENPKH

SEQ ID NO: 2593 - protein, 11 aa, Artificial
  IGFBP-2 heparin binding domain-containing peptide sequence
HKRVGIENPKH

SEQ ID NO: 2594 - protein, 11 aa, Artificial
  IGFBP-2 heparin binding domain-containing peptide sequence
KRRVGIENPKH

SEQ ID NO: 2595 - protein, 11 aa, Artificial
  IGFBP-2 heparin binding domain-containing peptide sequence
RRRVGIENPKH

SEQ ID NO: 2596 - protein, 11 aa, Artificial
  IGFBP-2 heparin binding domain-containing peptide sequence
HRRVGIENPKH

SEQ ID NO: 2597 - protein, 11 aa, Artificial
  IGFBP-2 heparin binding domain-containing peptide sequence
KHHLGVENPKH

SEQ ID NO: 2598 - protein, 11 aa, Artificial
  IGFBP-2 heparin binding domain-containing peptide sequence
RHHLGVENPKH

SEQ ID NO: 2599 - protein, 11 aa, Artificial
  IGFBP-2 heparin binding domain-containing peptide sequence
HHHLGVENPKH

SEQ ID NO: 2600 - protein, 11 aa, Artificial
  IGFBP-2 heparin binding domain-containing peptide sequence
KKHLGVENPKH

SEQ ID NO: 2601 - protein, 11 aa, Artificial
  IGFBP-2 heparin binding domain-containing peptide sequence
RKHLGVENPKH

SEQ ID NO: 2602 - protein, 11 aa, Artificial
  IGFBP-2 heparin binding domain-containing peptide sequence
HKHLGVENPKH

SEQ ID NO: 2603 - protein, 11 aa, Artificial
  IGFBP-2 heparin binding domain-containing peptide sequence
KRHLGVENPKH

SEQ ID NO: 2604 - protein, 11 aa, Artificial
  IGFBP-2 heparin binding domain-containing peptide sequence
RRHLGVENPKH

SEQ ID NO: 2605 - protein, 11 aa, Artificial
  IGFBP-2 heparin binding domain-containing peptide sequence
HRHLGVENPKH

SEQ ID NO: 2606 - protein, 11 aa, Artificial
  IGFBP-2 heparin binding domain-containing peptide sequence
KHKLGVENPKH

SEQ ID NO: 2607 - protein, 11 aa, Artificial
  IGFBP-2 heparin binding domain-containing peptide sequence
RHKLGVENPKH

SEQ ID NO: 2608 - protein, 11 aa, Artificial
  IGFBP-2 heparin binding domain-containing peptide sequence
HHKLGVENPKH

SEQ ID NO: 2609 - protein, 11 aa, Artificial
  IGFBP-2 heparin binding domain-containing peptide sequence
KKKLGVENPKH

SEQ ID NO: 2610 - protein, 11 aa, Artificial
  IGFBP-2 heparin binding domain-containing peptide sequence
RKKLGVENPKH

SEQ ID NO: 2611 - protein, 11 aa, Artificial
  IGFBP-2 heparin binding domain-containing peptide sequence
HKKLGVENPKH

SEQ ID NO: 2612 - protein, 11 aa, Artificial
  IGFBP-2 heparin binding domain-containing peptide sequence
KRKLGVENPKH

SEQ ID NO: 2613 - protein, 11 aa, Artificial
  IGFBP-2 heparin binding domain-containing peptide sequence
RRKLGVENPKH

SEQ ID NO: 2614 - protein, 11 aa, Artificial
  IGFBP-2 heparin binding domain-containing peptide sequence
HRKLGVENPKH

SEQ ID NO: 2615 - protein, 11 aa, Artificial
  IGFBP-2 heparin binding domain-containing peptide sequence
KHRLGVENPKH

SEQ ID NO: 2616 - protein, 11 aa, Artificial
  IGFBP-2 heparin binding domain-containing peptide sequence
RHRLGVENPKH

SEQ ID NO: 2617 - protein, 11 aa, Artificial
  IGFBP-2 heparin binding domain-containing peptide sequence
HHRLGVENPKH

SEQ ID NO: 2618 - protein, 11 aa, Artificial
  IGFBP-2 heparin binding domain-containing peptide sequence
KKRLGVENPKH

SEQ ID NO: 2619 - protein, 11 aa, Artificial
  IGFBP-2 heparin binding domain-containing peptide sequence
RKRLGVENPKH

SEQ ID NO: 2620 - protein, 11 aa, Artificial
  IGFBP-2 heparin binding domain-containing peptide sequence
HKRLGVENPKH

SEQ ID NO: 2621 - protein, 11 aa, Artificial
  IGFBP-2 heparin binding domain-containing peptide sequence
KRRLGVENPKH

SEQ ID NO: 2622 - protein, 11 aa, Artificial
  IGFBP-2 heparin binding domain-containing peptide sequence
RRRLGVENPKH

SEQ ID NO: 2623 - protein, 11 aa, Artificial
  IGFBP-2 heparin binding domain-containing peptide sequence
HRRLGVENPKH

SEQ ID NO: 2624 - protein, 11 aa, Artificial
  IGFBP-2 heparin binding domain-containing peptide sequence
KHHIGVENPKH

SEQ ID NO: 2625 - protein, 11 aa, Artificial
  IGFBP-2 heparin binding domain-containing peptide sequence
RHHIGVEEPKH

SEQ ID NO: 2626 - protein, 11 aa, Artificial
  IGFBP-2 heparin binding domain-containing peptide sequence
HHHIGVENPKH

SEQ ID NO: 2627 - protein, 11 aa, Artificial
  IGFBP-2 heparin binding domain-containing peptide sequence
KKHIGVENPKH

SEQ ID NO: 2628 - protein, 11 aa, Artificial
  IGFBP-2 heparin binding domain-containing peptide sequence
RKHIGVENPKH

SEQ ID NO: 2629 - protein, 11 aa, Artificial
  IGFBP-2 heparin binding domain-containing peptide sequence
HKHIGVENPKH

SEQ ID NO: 2630 - protein, 11 aa, Artificial
  IGFBP-2 heparin binding domain-containing peptide sequence
KRHIGVENPKH

SEQ ID NO: 2631 - protein, 11 aa, Artificial
  IGFBP-2 heparin binding domain-containing peptide sequence
RRHIGVENPKH

SEQ ID NO: 2632 - protein, 11 aa, Artificial
  IGFBP-2 heparin binding domain-containing peptide sequence
HRHIGVENPKH

SEQ ID NO: 2633 - protein, 11 aa, Artificial
  IGFBP-2 heparin binding domain-containing peptide sequence
KHKIGVENPKH

SEQ ID NO: 2634 - protein, 11 aa, Artificial
  IGFBP-2 heparin binding domain-containing peptide sequence
RHKIGVENPKH

SEQ ID NO: 2635 - protein, 11 aa, Artificial
  IGFBP-2 heparin binding domain-containing peptide sequence
HHKIGVENPKH

SEQ ID NO: 2636 - protein, 11 aa, Artificial
  IGFBP-2 heparin binding domain-containing peptide sequence
KKKIGVENPKH

SEQ ID NO: 2637 - protein, 11 aa, Artificial
  IGFBP-2 heparin binding domain-containing peptide sequence
RKKIGVENPKH

SEQ ID NO: 2638 - protein, 11 aa, Artificial
  IGFBP-2 heparin binding domain-containing peptide sequence
HKKIGVENPKH

SEQ ID NO: 2639 - protein, 11 aa, Artificial
  IGFBP-2 heparin binding domain-containing peptide sequence
KRKIGVENPKH

SEQ ID NO: 2640 - protein, 11 aa, Artificial
  IGFBP-2 heparin binding domain-containing peptide sequence
RRKIGVENPKH

SEQ ID NO: 2641 - protein, 11 aa, Artificial
  IGFBP-2 heparin binding domain-containing peptide sequence
HRKIGVENPKH

SEQ ID NO: 2642 - protein, 11 aa, Artificial
  IGFBP-2 heparin binding domain-containing peptide sequence
KHRIGVENPKH

SEQ ID NO: 2643 - protein, 11 aa, Artificial
  IGFBP-2 heparin binding domain-containing peptide sequence
RHRIGVENPKH

SEQ ID NO: 2644 - protein, 11 aa, Artificial
  IGFBP-2 heparin binding domain-containing peptide sequence
HHRIGVENPKH

SEQ ID NO: 2645 - protein, 11 aa, Artificial
  IGFBP-2 heparin binding domain-containing peptide sequence
KKRIGVENPKH

SEQ ID NO: 2646 - protein, 11 aa, Artificial
  IGFBP-2 heparin binding domain-containing peptide sequence
RKRIGVENPKH

SEQ ID NO: 2647 - protein, 11 aa, Artificial
  IGFBP-2 heparin binding domain-containing peptide sequence
HKRIGVENPKH

SEQ ID NO: 2648 - protein, 11 aa, Artificial
  IGFBP-2 heparin binding domain-containing peptide sequence
KRRIGVENPKH

SEQ ID NO: 2649 - protein, 11 aa, Artificial
  IGFBP-2 heparin binding domain-containing peptide sequence
RRRIGVENPKH

SEQ ID NO: 2650 - protein, 11 aa, Artificial
  IGFBP-2 heparin binding domain-containing peptide sequence
HRRIGVENPKH

SEQ ID NO: 2651 - protein, 11 aa, Artificial
  IGFBP-2 heparin binding domain-containing peptide sequence
KHHVGVENPKH

SEQ ID NO: 2652 - protein, 11 aa, Artificial
  IGFBP-2 heparin binding domain-containing peptide sequence
RHHVGVENPKH

SEQ ID NO: 2653 - protein, 11 aa, Artificial
  IGFBP-2 heparin binding domain-containing peptide sequence
HHHVGVENPKH

SEQ ID NO: 2654 - protein, 11 aa, Artificial
  IGFBP-2 heparin binding domain-containing peptide sequence
KKHVGVENPKH

SEQ ID NO: 2655 - protein, 11 aa, Artificial
  IGFBP-2 heparin binding domain-containing peptide sequence
RKHVGVENPKH

SEQ ID NO: 2656 - protein, 11 aa, Artificial
  IGFBP-2 heparin binding domain-containing peptide sequence
HKHVGVENPKH

SEQ ID NO: 2657 - protein, 11 aa, Artificial
  IGFBP-2 heparin binding domain-containing peptide sequence
KRHVGVENPKH

SEQ ID NO: 2658 - protein, 11 aa, Artificial
  IGFBP-2 heparin binding domain-containing peptide sequence
RRHVGVENPKH

SEQ ID NO: 2659 - protein, 11 aa, Artificial
  IGFBP-2 heparin binding domain-containing peptide sequence
HRHVGVENPKH

SEQ ID NO: 2660 - protein, 11 aa, Artificial
  IGFBP-2 heparin binding domain-containing peptide sequence
KHKVGVENPKH

SEQ ID NO: 2661 - protein, 11 aa, Artificial
  IGFBP-2 heparin binding domain-containing peptide sequence
RHKVGVENPKH

SEQ ID NO: 2662 - protein, 11 aa, Artificial
  IGFBP-2 heparin binding domain-containing peptide sequence
HHKVGVENPKH

SEQ ID NO: 2663 - protein, 11 aa, Artificial
  IGFBP-2 heparin binding domain-containing peptide sequence
KKKVGVENPKH

SEQ ID NO: 2664 - protein, 11 aa, Artificial
  IGFBP-2 heparin binding domain-containing peptide sequence
RKKVGVENPKH

SEQ ID NO: 2665 - protein, 11 aa, Artificial
  IGFBP-2 heparin binding domain-containing peptide sequence
HKKVGVENPKH

SEQ ID NO: 2666 - protein, 11 aa, Artificial
  IGFBP-2 heparin binding domain-containing peptide sequence
KRKVGVENPKH

SEQ ID NO: 2667 - protein, 11 aa, Artificial
  IGFBP-2 heparin binding domain-containing peptide sequence
RRKVGVEEPKH

SEQ ID NO: 2668 - protein, 11 aa, Artificial
  IGFBP-2 heparin binding domain-containing peptide sequence
HRKVGVENPKH

SEQ ID NO: 2669 - protein, 11 aa, Artificial
  IGFBP-2 heparin binding domain-containing peptide sequence
KHRVGVENPKH

SEQ ID NO: 2670 - protein, 11 aa, Artificial
  IGFBP-2 heparin binding domain-containing peptide sequence
RHRVGVENPKH

SEQ ID NO: 2671 - protein, 11 aa, Artificial
  IGFBP-2 heparin binding domain-containing peptide sequence
HHRVGVENPKH

SEQ ID NO: 2672 - protein, 11 aa, Artificial
  IGFBP-2 heparin binding domain-containing peptide sequence
KKRVGVENPKH

SEQ ID NO: 2673 - protein, 11 aa, Artificial
  IGFBP-2 heparin binding domain-containing peptide sequence
RKRVGVENPKH

SEQ ID NO: 2674 - protein, 11 aa, Artificial
  IGFBP-2 heparin binding domain-containing peptide sequence
HKRVGVENPKH

SEQ ID NO: 2675 - protein, 11 aa, Artificial
  IGFBP-2 heparin binding domain-containing peptide sequence
KRRVGVENPKH

SEQ ID NO: 2676 - protein, 11 aa, Artificial
  IGFBP-2 heparin binding domain-containing peptide sequence
RRRVGVENPKH

SEQ ID NO: 2677 - protein, 11 aa, Artificial
  IGFBP-2 heparin binding domain-containing peptide sequence
HRRVGVENPKH

SEQ ID NO: 2678 - protein, 11 aa, Artificial
  IGFBP-2 heparin binding domain-containing peptide sequence
KHHLGLNNPKH

SEQ ID NO: 2679 - protein, 11 aa, Artificial
  IGFBP-2 heparin binding domain-containing peptide sequence
RHHLGLNNPKH

SEQ ID NO: 2680 - protein, 11 aa, Artificial
  IGFBP-2 heparin binding domain-containing peptide sequence
HHHLGLNNPKH

SEQ ID NO: 2681 - protein, 11 aa, Artificial
  IGFBP-2 heparin binding domain-containing peptide sequence
KKHLGLNNPKH

SEQ ID NO: 2682 - protein, 11 aa, Artificial
  IGFBP-2 heparin binding domain-containing peptide sequence
RKHLGLNNPKH

SEQ ID NO: 2683 - protein, 11 aa, Artificial
  IGFBP-2 heparin binding domain-containing peptide sequence
HKHLGLNNPKH

SEQ ID NO: 2684 - protein, 11 aa, Artificial
  IGFBP-2 heparin binding domain-containing peptide sequence
KRHLGLNNPKH

SEQ ID NO: 2685 - protein, 11 aa, Artificial
  IGFBP-2 heparin binding domain-containing peptide sequence
RRHLGLNNPKH

SEQ ID NO: 2686 - protein, 11 aa, Artificial
  IGFBP-2 heparin binding domain-containing peptide sequence
HRHLGLNNPKH

SEQ ID NO: 2687 - protein, 11 aa, Artificial
  IGFBP-2 heparin binding domain-containing peptide sequence
KHKLGLNNPKH

SEQ ID NO: 2688 - protein, 11 aa, Artificial
  IGFBP-2 heparin binding domain-containing peptide sequence
RHKLGLNNPKH

SEQ ID NO: 2689 - protein, 11 aa, Artificial
  IGFBP-2 heparin binding domain-containing peptide sequence
HHKLGLNNPKH

SEQ ID NO: 2690 - protein, 11 aa, Artificial
  IGFBP-2 heparin binding domain-containing peptide sequence
KKKLGLNNPKH

SEQ ID NO: 2691 - protein, 11 aa, Artificial
  IGFBP-2 heparin binding domain-containing peptide sequence
RKKLGLNNPKH

SEQ ID NO: 2692 - protein, 11 aa, Artificial
  IGFBP-2 heparin binding domain-containing peptide sequence
HKKLGLNNPKH

SEQ ID NO: 2693 - protein, 11 aa, Artificial
  IGFBP-2 heparin binding domain-containing peptide sequence
KRKLGLNNPKH

SEQ ID NO: 2694 - protein, 11 aa, Artificial
  IGFBP-2 heparin binding domain-containing peptide sequence
RRKLGLNNPKH

SEQ ID NO: 2695 - protein, 11 aa, Artificial
  IGFBP-2 heparin binding domain-containing peptide sequence
HRKLGLNNPKH

SEQ ID NO: 2696 - protein, 11 aa, Artificial
  IGFBP-2 heparin binding domain-containing peptide sequence
KHRLGLNNPKH

SEQ ID NO: 2697 - protein, 11 aa, Artificial
  IGFBP-2 heparin binding domain-containing peptide sequence
RHRLGLNNPKH

SEQ ID NO: 2698 - protein, 11 aa, Artificial
  IGFBP-2 heparin binding domain-containing peptide sequence
HHRLGLNNPKH

SEQ ID NO: 2699 - protein, 11 aa, Artificial
  IGFBP-2 heparin binding domain-containing peptide sequence
KKRLGLNNPKH

SEQ ID NO: 2700 - protein, 11 aa, Artificial
  IGFBP-2 heparin binding domain-containing peptide sequence
RKRLGLNNPKH

SEQ ID NO: 2701 - protein, 11 aa, Artificial
  IGFBP-2 heparin binding domain-containing peptide sequence
HKRLGLNNPKH

SEQ ID NO: 2702 - protein, 11 aa, Artificial
  IGFBP-2 heparin binding domain-containing peptide sequence
KRRLGLNNPKH

SEQ ID NO: 2703 - protein, 11 aa, Artificial
  IGFBP-2 heparin binding domain-containing peptide sequence
RRRLGLNNPKH

SEQ ID NO: 2704 - protein, 11 aa, Artificial
  IGFBP-2 heparin binding domain-containing peptide sequence
HRRLGLNNPKH

SEQ ID NO: 2705 - protein, 11 aa, Artificial
  IGFBP-2 heparin binding domain-containing peptide sequence
KHHIGLNNPKH

SEQ ID NO: 2706 - protein, 11 aa, Artificial
  IGFBP-2 heparin binding domain-containing peptide sequence
RHHIGLNNPKH

SEQ ID NO: 2707 - protein, 11 aa, Artificial
  IGFBP-2 heparin binding domain-containing peptide sequence
HHHIGLNNPKH

SEQ ID NO: 2708 - protein, 11 aa, Artificial
  IGFBP-2 heparin binding domain-containing peptide sequence
KKHIGLNNPKH

SEQ ID NO: 2709 - protein, 11 aa, Artificial
  IGFBP-2 heparin binding domain-containing peptide sequence
RKHIGLNNPKH

SEQ ID NO: 2710 - protein, 11 aa, Artificial
  IGFBP-2 heparin binding domain-containing peptide sequence
HKHIGLNNPKH

SEQ ID NO: 2711 - protein, 11 aa, Artificial
  IGFBP-2 heparin binding domain-containing peptide sequence
KRHIGLNNPKH

SEQ ID NO: 2712 - protein, 11 aa, Artificial
  IGFBP-2 heparin binding domain-containing peptide sequence
RRHIGLNNPKH

SEQ ID NO: 2713 - protein, 11 aa, Artificial
  IGFBP-2 heparin binding domain-containing peptide sequence
HRHIGLNNPKH

SEQ ID NO: 2714 - protein, 11 aa, Artificial
  IGFBP-2 heparin binding domain-containing peptide sequence
KHKIGLNNPKH

SEQ ID NO: 2715 - protein, 11 aa, Artificial
  IGFBP-2 heparin binding domain-containing peptide sequence
RHKIGLNNPKH

SEQ ID NO: 2716 - protein, 11 aa, Artificial
  IGFBP-2 heparin binding domain-containing peptide sequence
HHKIGLNNPKH

SEQ ID NO: 2717 - protein, 11 aa, Artificial
  IGFBP-2 heparin binding domain-containing peptide sequence
KKKIGLNNPKH

SEQ ID NO: 2718 - protein, 11 aa, Artificial
  IGFBP-2 heparin binding domain-containing peptide sequence
RKKIGLNNPKH

SEQ ID NO: 2719 - protein, 11 aa, Artificial
  IGFBP-2 heparin binding domain-containing peptide sequence
HKKIGLNNPKH

SEQ ID NO: 2720 - protein, 11 aa, Artificial
  IGFBP-2 heparin binding domain-containing peptide sequence
KRKIGLNNPKH

SEQ ID NO: 2721 - protein, 11 aa, Artificial
  IGFBP-2 heparin binding domain-containing peptide sequence
RRKIGLNNPKH

SEQ ID NO: 2722 - protein, 11 aa, Artificial
  IGFBP-2 heparin binding domain-containing peptide sequence
HRKIGLNNPKH

SEQ ID NO: 2723 - protein, 11 aa, Artificial
  IGFBP-2 heparin binding domain-containing peptide sequence
KHRIGLNNPKH

SEQ ID NO: 2724 - protein, 11 aa, Artificial
  IGFBP-2 heparin binding domain-containing peptide sequence
RHRIGLNNPKH

SEQ ID NO: 2725 - protein, 11 aa, Artificial
  IGFBP-2 heparin binding domain-containing peptide sequence
HHRIGLNNPKH

SEQ ID NO: 2726 - protein, 11 aa, Artificial
  IGFBP-2 heparin binding domain-containing peptide sequence
KKRIGLNNPKH

SEQ ID NO: 2727 - protein, 11 aa, Artificial
  IGFBP-2 heparin binding domain-containing peptide sequence
RKRIGLNNPKH

SEQ ID NO: 2728 - protein, 11 aa, Artificial
  IGFBP-2 heparin binding domain-containing peptide sequence
HKRIGLNNPKH

SEQ ID NO: 2729 - protein, 11 aa, Artificial
  IGFBP-2 heparin binding domain-containing peptide sequence
KRRIGLNNPKH

SEQ ID NO: 2730 - protein, 11 aa, Artificial
  IGFBP-2 heparin binding domain-containing peptide sequence
RRRIGLNNPKH

SEQ ID NO: 2731 - protein, 11 aa, Artificial
  IGFBP-2 heparin binding domain-containing peptide sequence
HRRIGLNNPKH

SEQ ID NO: 2732 - protein, 11 aa, Artificial
  IGFBP-2 heparin binding domain-containing peptide sequence
KHHVGLNNPKH

SEQ ID NO: 2733 - protein, 11 aa, Artificial
  IGFBP-2 heparin binding domain-containing peptide sequence
RHHVGLNNPKH

SEQ ID NO: 2734 - protein, 11 aa, Artificial
  IGFBP-2 heparin binding domain-containing peptide sequence
HHHVGLNNPKH

SEQ ID NO: 2735 - protein, 11 aa, Artificial
  IGFBP-2 heparin binding domain-containing peptide sequence
KKHVGLNNPKH

SEQ ID NO: 2736 - protein, 11 aa, Artificial
  IGFBP-2 heparin binding domain-containing peptide sequence
RKHVGLNNPKH

SEQ ID NO: 2737 - protein, 11 aa, Artificial
  IGFBP-2 heparin binding domain-containing peptide sequence
HKHVGLNNPKH

SEQ ID NO: 2738 - protein, 11 aa, Artificial
  IGFBP-2 heparin binding domain-containing peptide sequence
KRHVGLNNPKH

SEQ ID NO: 2739 - protein, 11 aa, Artificial
  IGFBP-2 heparin binding domain-containing peptide sequence
RRHVGLNNPKH

SEQ ID NO: 2740 - protein, 11 aa, Artificial
  IGFBP-2 heparin binding domain-containing peptide sequence
HRHVGLNNPKH

SEQ ID NO: 2741 - protein, 11 aa, Artificial
  IGFBP-2 heparin binding domain-containing peptide sequence
KHKVGLNNPKH

SEQ ID NO: 2742 - protein, 11 aa, Artificial
  IGFBP-2 heparin binding domain-containing peptide sequence
RHKVGLNNPKH

SEQ ID NO: 2743 - protein, 11 aa, Artificial
  IGFBP-2 heparin binding domain-containing peptide sequence
HHKVGLNNPKH

SEQ ID NO: 2744 - protein, 11 aa, Artificial
  IGFBP-2 heparin binding domain-containing peptide sequence
KKKVGLNNPKH

SEQ ID NO: 2745 - protein, 11 aa, Artificial
  IGFBP-2 heparin binding domain-containing peptide sequence
RKKVGLNNPKH

SEQ ID NO: 2746 - protein, 11 aa, Artificial
  IGFBP-2 heparin binding domain-containing peptide sequence
HKKVGLNNPKH

SEQ ID NO: 2747 - protein, 11 aa, Artificial
  IGFBP-2 heparin binding domain-containing peptide sequence
KRKVGLNNPKH

SEQ ID NO: 2748 - protein, 11 aa, Artificial
  IGFBP-2 heparin binding domain-containing peptide sequence
RRKVGLNNPKH

SEQ ID NO: 2749 - protein, 11 aa, Artificial
  IGFBP-2 heparin binding domain-containing peptide sequence
HRKVGLNNPKH

SEQ ID NO: 2750 - protein, 11 aa, Artificial
  IGFBP-2 heparin binding domain-containing peptide sequence
KHRVGLNNPKH

SEQ ID NO: 2751 - protein, 11 aa, Artificial
  IGFBP-2 heparin binding domain-containing peptide sequence
RHRVGLNNPKH

SEQ ID NO: 2752 - protein, 11 aa, Artificial
  IGFBP-2 heparin binding domain-containing peptide sequence
HHRVGLNNPKH

SEQ ID NO: 2753 - protein, 11 aa, Artificial
  IGFBP-2 heparin binding domain-containing peptide sequence
KKRVGLNNPKH

SEQ ID NO: 2754 - protein, 11 aa, Artificial
  IGFBP-2 heparin binding domain-containing peptide sequence
RKRVGLNNPKH

SEQ ID NO: 2755 - protein, 11 aa, Artificial
  IGFBP-2 heparin binding domain-containing peptide sequence
HKRVGLNNPKH

SEQ ID NO: 2756 - protein, 11 aa, Artificial
  IGFBP-2 heparin binding domain-containing peptide sequence
KRRVGLNNPKH

SEQ ID NO: 2757 - protein, 11 aa, Artificial
  IGFBP-2 heparin binding domain-containing peptide sequence
RRRVGLNNPKH

SEQ ID NO: 2758 - protein, 11 aa, Artificial
  IGFBP-2 heparin binding domain-containing peptide sequence
HRRVGLNNPKH

SEQ ID NO: 2759 - protein, 11 aa, Artificial
  IGFBP-2 heparin binding domain-containing peptide sequence
KHHLGINNPKH

SEQ ID NO: 2760 - protein, 11 aa, Artificial
  IGFBP-2 heparin binding domain-containing peptide sequence
RHHLGINNPKH

SEQ ID NO: 2761 - protein, 11 aa, Artificial
  IGFBP-2 heparin binding domain-containing peptide sequence
HHHLGINNPKH

SEQ ID NO: 2762 - protein, 11 aa, Artificial
  IGFBP-2 heparin binding domain-containing peptide sequence
KKHLGINNPKH

SEQ ID NO: 2763 - protein, 11 aa, Artificial
  IGFBP-2 heparin binding domain-containing peptide sequence
RKHLGINNPKH

SEQ ID NO: 2764 - protein, 11 aa, Artificial
  IGFBP-2 heparin binding domain-containing peptide sequence
HKHLGINNPKH

SEQ ID NO: 2765 - protein, 11 aa, Artificial
  IGFBP-2 heparin binding domain-containing peptide sequence
KRHLGINNPKH

SEQ ID NO: 2766 - protein, 11 aa, Artificial
  IGFBP-2 heparin binding domain-containing peptide sequence
RRHLGINNPKH

SEQ ID NO: 2767 - protein, 11 aa, Artificial
  IGFBP-2 heparin binding domain-containing peptide sequence
HRHLGINNPKH

SEQ ID NO: 2768 - protein, 11 aa, Artificial
  IGFBP-2 heparin binding domain-containing peptide sequence
KHKLGINNPKH

SEQ ID NO: 2769 - protein, 11 aa, Artificial
  IGFBP-2 heparin binding domain-containing peptide sequence
RHKLGINNPKH

SEQ ID NO: 2770 - protein, 11 aa, Artificial
  IGFBP-2 heparin binding domain-containing peptide sequence
HHKLGINNPKH

SEQ ID NO: 2771 - protein, 11 aa, Artificial
  IGFBP-2 heparin binding domain-containing peptide sequence
KKKLGINNPKH

SEQ ID NO: 2772 - protein, 11 aa, Artificial
  IGFBP-2 heparin binding domain-containing peptide sequence
RKKLGINNPKH

SEQ ID NO: 2773 - protein, 11 aa, Artificial
  IGFBP-2 heparin binding domain-containing peptide sequence
HKKLGINNPKH

SEQ ID NO: 2774 - protein, 11 aa, Artificial
  IGFBP-2 heparin binding domain-containing peptide sequence
KRKLGINNPKH

SEQ ID NO: 2775 - protein, 11 aa, Artificial
  IGFBP-2 heparin binding domain-containing peptide sequence
RRKLGINNPKH

SEQ ID NO: 2776 - protein, 11 aa, Artificial
  IGFBP-2 heparin binding domain-containing peptide sequence
HRKLGINNPKH

SEQ ID NO: 2777 - protein, 11 aa, Artificial
  IGFBP-2 heparin binding domain-containing peptide sequence
KHRLGINNPKH

SEQ ID NO: 2778 - protein, 11 aa, Artificial
  IGFBP-2 heparin binding domain-containing peptide sequence
RHRLGINNPKH

SEQ ID NO: 2779 - protein, 11 aa, Artificial
  IGFBP-2 heparin binding domain-containing peptide sequence
HHRLGINNPKH

SEQ ID NO: 2780 - protein, 11 aa, Artificial
  IGFBP-2 heparin binding domain-containing peptide sequence
KKRLGINNPKH

SEQ ID NO: 2781 - protein, 11 aa, Artificial
  IGFBP-2 heparin binding domain-containing peptide sequence
RKRLGINNPKH

SEQ ID NO: 2782 - protein, 11 aa, Artificial
  IGFBP-2 heparin binding domain-containing peptide sequence
HKRLGINNPKH

SEQ ID NO: 2783 - protein, 11 aa, Artificial
  IGFBP-2 heparin binding domain-containing peptide sequence
KRRLGINNPKH

SEQ ID NO: 2784 - protein, 11 aa, Artificial
  IGFBP-2 heparin binding domain-containing peptide sequence
RRRLGINNPKH

SEQ ID NO: 2785 - protein, 11 aa, Artificial
  IGFBP-2 heparin binding domain-containing peptide sequence
HRRLGINNPKH

SEQ ID NO: 2786 - protein, 11 aa, Artificial
  IGFBP-2 heparin binding domain-containing peptide sequence
KHHIGIENPKH

SEQ ID NO: 2787 - protein, 11 aa, Artificial
  IGFBP-2 heparin binding domain-containing peptide sequence
RHHIGINNPKH

SEQ ID NO: 2788 - protein, 11 aa, Artificial
  IGFBP-2 heparin binding domain-containing peptide sequence
HHHIGINNPKH

SEQ ID NO: 2789 - protein, 11 aa, Artificial
  IGFBP-2 heparin binding domain-containing peptide sequence
KKHIGINNPKH

SEQ ID NO: 2790 - protein, 11 aa, Artificial
  IGFBP-2 heparin binding domain-containing peptide sequence
RKHIGINNPKH

SEQ ID NO: 2791 - protein, 11 aa, Artificial
  IGFBP-2 heparin binding domain-containing peptide sequence
HKHIGINNPKH

SEQ ID NO: 2792 - protein, 11 aa, Artificial
  IGFBP-2 heparin binding domain-containing peptide sequence
KRHIGINNPKH

SEQ ID NO: 2793 - protein, 11 aa, Artificial
  IGFBP-2 heparin binding domain-containing peptide sequence
RRHIGINNPKH

SEQ ID NO: 2794 - protein, 11 aa, Artificial
  IGFBP-2 heparin binding domain-containing peptide sequence
HRHIGINNPKH

SEQ ID NO: 2795 - protein, 11 aa, Artificial
  IGFBP-2 heparin binding domain-containing peptide sequence
KHKIGINNPKH

SEQ ID NO: 2796 - protein, 11 aa, Artificial
  IGFBP-2 heparin binding domain-containing peptide sequence
RHKIGINNPKH

SEQ ID NO: 2797 - protein, 11 aa, Artificial
  IGFBP-2 heparin binding domain-containing peptide sequence
HHKIGINNPKH

SEQ ID NO: 2798 - protein, 11 aa, Artificial
  IGFBP-2 heparin binding domain-containing peptide sequence
KKKIGINNPKH

SEQ ID NO: 2799 - protein, 11 aa, Artificial
  IGFBP-2 heparin binding domain-containing peptide sequence
RKKIGINNPKH

SEQ ID NO: 2800 - protein, 11 aa, Artificial
  IGFBP-2 heparin binding domain-containing peptide sequence
HKKIGINNPKH

SEQ ID NO: 2801 - protein, 11 aa, Artificial
  IGFBP-2 heparin binding domain-containing peptide sequence
KRKIGINNPKH

SEQ ID NO: 2802 - protein, 11 aa, Artificial
  IGFBP-2 heparin binding domain-containing peptide sequence
RRKIGINNPKH

SEQ ID NO: 2803 - protein, 11 aa, Artificial
  IGFBP-2 heparin binding domain-containing peptide sequence
HRKIGINNPKH

SEQ ID NO: 2804 - protein, 11 aa, Artificial
  IGFBP-2 heparin binding domain-containing peptide sequence
KHRIGINNPKH

SEQ ID NO: 2805 - protein, 11 aa, Artificial
  IGFBP-2 heparin binding domain-containing peptide sequence
RHRIGINNPKH

SEQ ID NO: 2806 - protein, 11 aa, Artificial
  IGFBP-2 heparin binding domain-containing peptide sequence
HHRIGINNPKH

SEQ ID NO: 2807 - protein, 11 aa, Artificial
  IGFBP-2 heparin binding domain-containing peptide sequence
KKRIGINNPKH

SEQ ID NO: 2808 - protein, 11 aa, Artificial
  IGFBP-2 heparin binding domain-containing peptide sequence
RKRIGINNPKH

SEQ ID NO: 2809 - protein, 11 aa, Artificial
  IGFBP-2 heparin binding domain-containing peptide sequence
HKRIGINNPKH

SEQ ID NO: 2810 - protein, 11 aa, Artificial
  IGFBP-2 heparin binding domain-containing peptide sequence
KRRIGINNPKH

SEQ ID NO: 2811 - protein, 11 aa, Artificial
  IGFBP-2 heparin binding domain-containing peptide sequence
RRRIGINNPKH

SEQ ID NO: 2812 - protein, 11 aa, Artificial
  IGFBP-2 heparin binding domain-containing peptide sequence
HRRIGINNPKH

SEQ ID NO: 2813 - protein, 11 aa, Artificial
  IGFBP-2 heparin binding domain-containing peptide sequence
KHHVGINNPKH

SEQ ID NO: 2814 - protein, 11 aa, Artificial
  IGFBP-2 heparin binding domain-containing peptide sequence
RHHVGINNPKH

SEQ ID NO: 2815 - protein, 11 aa, Artificial
  IGFBP-2 heparin binding domain-containing peptide sequence
HHHVGINNPKH

SEQ ID NO: 2816 - protein, 11 aa, Artificial
  IGFBP-2 heparin binding domain-containing peptide sequence
KKHVGINNPKH

SEQ ID NO: 2817 - protein, 11 aa, Artificial
  IGFBP-2 heparin binding domain-containing peptide sequence
RKHVGINNPKH

SEQ ID NO: 2818 - protein, 11 aa, Artificial
  IGFBP-2 heparin binding domain-containing peptide sequence
HKHVGINNPKH

SEQ ID NO: 2819 - protein, 11 aa, Artificial
  IGFBP-2 heparin binding domain-containing peptide sequence
KRHVGINNPKH

SEQ ID NO: 2820 - protein, 11 aa, Artificial
  IGFBP-2 heparin binding domain-containing peptide sequence
RRHVGINNPKH

SEQ ID NO: 2821 - protein, 11 aa, Artificial
  IGFBP-2 heparin binding domain-containing peptide sequence
HRHVGINNPKH

SEQ ID NO: 2822 - protein, 11 aa, Artificial
  IGFBP-2 heparin binding domain-containing peptide sequence
KHKVGINNPKH

SEQ ID NO: 2823 - protein, 11 aa, Artificial
  IGFBP-2 heparin binding domain-containing peptide sequence
RHKVGINNPKH

SEQ ID NO: 2824 - protein, 11 aa, Artificial
  IGFBP-2 heparin binding domain-containing peptide sequence
HHKVGINNPKH

SEQ ID NO: 2825 - protein, 11 aa, Artificial
  IGFBP-2 heparin binding domain-containing peptide sequence
KKKVGINNPKH

SEQ ID NO: 2826 - protein, 11 aa, Artificial
  IGFBP-2 heparin binding domain-containing peptide sequence
RKKVGINNPKH

SEQ ID NO: 2827 - protein, 11 aa, Artificial
  IGFBP-2 heparin binding domain-containing peptide sequence
HKKVGINNPKH

SEQ ID NO: 2828 - protein, 11 aa, Artificial
  IGFBP-2 heparin binding domain-containing peptide sequence
KRKVGINNPKH

SEQ ID NO: 2829 - protein, 11 aa, Artificial
  IGFBP-2 heparin binding domain-containing peptide sequence
RRKVGINNPKH

SEQ ID NO: 2830 - protein, 11 aa, Artificial
  IGFBP-2 heparin binding domain-containing peptide sequence
HRKVGINNPKH

SEQ ID NO: 2831 - protein, 11 aa, Artificial
  IGFBP-2 heparin binding domain-containing peptide sequence
KHRVGINNPKH

SEQ ID NO: 2832 - protein, 11 aa, Artificial
  IGFBP-2 heparin binding domain-containing peptide sequence
RHRVGINNPKH

SEQ ID NO: 2833 - protein, 11 aa, Artificial
  IGFBP-2 heparin binding domain-containing peptide sequence
HHRVGINNPKH

SEQ ID NO: 2834 - protein, 11 aa, Artificial
  IGFBP-2 heparin binding domain-containing peptide sequence
KKRVGINNPKH

SEQ ID NO: 2835 - protein, 11 aa, Artificial
  IGFBP-2 heparin binding domain-containing peptide sequence
RKRVGINNPKH

SEQ ID NO: 2836 - protein, 11 aa, Artificial
  IGFBP-2 heparin binding domain-containing peptide sequence
HKRVGINNPKH

SEQ ID NO: 2837 - protein, 11 aa, Artificial
  IGFBP-2 heparin binding domain-containing peptide sequence
KRRVGINNPKH

SEQ ID NO: 2838 - protein, 11 aa, Artificial
  IGFBP-2 heparin binding domain-containing peptide sequence
RRRVGINNPKH

SEQ ID NO: 2839 - protein, 11 aa, Artificial
  IGFBP-2 heparin binding domain-containing peptide sequence
HRRVGINNPKH

SEQ ID NO: 2840 - protein, 11 aa, Artificial
  IGFBP-2 heparin binding domain-containing peptide sequence
KHHLGVNNPKH

SEQ ID NO: 2841 - protein, 11 aa, Artificial
  IGFBP-2 heparin binding domain-containing peptide sequence
RHHLGVNNPKH

SEQ ID NO: 2842 - protein, 11 aa, Artificial
  IGFBP-2 heparin binding domain-containing peptide sequence
HHHLGVNNPKH

SEQ ID NO: 2843 - protein, 11 aa, Artificial
  IGFBP-2 heparin binding domain-containing peptide sequence
KKHLGVNNPKH

SEQ ID NO: 2844 - protein, 11 aa, Artificial
  IGFBP-2 heparin binding domain-containing peptide sequence
RKHLGVNNPKH

SEQ ID NO: 2845 - protein, 11 aa, Artificial
  IGFBP-2 heparin binding domain-containing peptide sequence
HKHLGVNNPKH

SEQ ID NO: 2846 - protein, 11 aa, Artificial
  IGFBP-2 heparin binding domain-containing peptide sequence
KRHLGVNNPKH

SEQ ID NO: 2847 - protein, 11 aa, Artificial
  IGFBP-2 heparin binding domain-containing peptide sequence
RRHLGVNNPKH

SEQ ID NO: 2848 - protein, 11 aa, Artificial
  IGFBP-2 heparin binding domain-containing peptide sequence
HRHLGVNNPKH

SEQ ID NO: 2849 - protein, 11 aa, Artificial
  IGFBP-2 heparin binding domain-containing peptide sequence
KHKLGVNNPKH

SEQ ID NO: 2850 - protein, 11 aa, Artificial
  IGFBP-2 heparin binding domain-containing peptide sequence
RHKLGVNNPKH

SEQ ID NO: 2851 - protein, 11 aa, Artificial
  IGFBP-2 heparin binding domain-containing peptide sequence
HHKLGVNNPKH

SEQ ID NO: 2852 - protein, 11 aa, Artificial
  IGFBP-2 heparin binding domain-containing peptide sequence
KKKLGVNNPKH

SEQ ID NO: 2853 - protein, 11 aa, Artificial
  IGFBP-2 heparin binding domain-containing peptide sequence
RKKLGVNNPKH

SEQ ID NO: 2854 - protein, 11 aa, Artificial
  IGFBP-2 heparin binding domain-containing peptide sequence
HKKLGVNNPKH

SEQ ID NO: 2855 - protein, 11 aa, Artificial
  IGFBP-2 heparin binding domain-containing peptide sequence
KRKLGVNNPKH

SEQ ID NO: 2856 - protein, 11 aa, Artificial
  IGFBP-2 heparin binding domain-containing peptide sequence
RRKLGVNNPKH

SEQ ID NO: 2857 - protein, 11 aa, Artificial
  IGFBP-2 heparin binding domain-containing peptide sequence
HRKLGVNNPKH

SEQ ID NO: 2858 - protein, 11 aa, Artificial
  IGFBP-2 heparin binding domain-containing peptide sequence
KHRLGVNNPKH

SEQ ID NO: 2859 - protein, 11 aa, Artificial
  IGFBP-2 heparin binding domain-containing peptide sequence
RHRLGVNNPKH

SEQ ID NO: 2860 - protein, 11 aa, Artificial
  IGFBP-2 heparin binding domain-containing peptide sequence
HHRLGVNNPKH

SEQ ID NO: 2861 - protein, 11 aa, Artificial
  IGFBP-2 heparin binding domain-containing peptide sequence
KKRLGVNNPKH

SEQ ID NO: 2862 - protein, 11 aa, Artificial
  IGFBP-2 heparin binding domain-containing peptide sequence
RKRLGVNNPKH

SEQ ID NO: 2863 - protein, 11 aa, Artificial
  IGFBP-2 heparin binding domain-containing peptide sequence
HKRLGVNNPKH

SEQ ID NO: 2864 - protein, 11 aa, Artificial
  IGFBP-2 heparin binding domain-containing peptide sequence
KRRLGVNNPKH

SEQ ID NO: 2865 - protein, 11 aa, Artificial
  IGFBP-2 heparin binding domain-containing peptide sequence
RRRLGVNNPKH

SEQ ID NO: 2866 - protein, 11 aa, Artificial
  IGFBP-2 heparin binding domain-containing peptide sequence
HRRLGVNNPKH

SEQ ID NO: 2867 - protein, 11 aa, Artificial
  IGFBP-2 heparin binding domain-containing peptide sequence
KHHIGVNNPKH

SEQ ID NO: 2868 - protein, 11 aa, Artificial
  IGFBP-2 heparin binding domain-containing peptide sequence
RHHIGVNNPKH

SEQ ID NO: 2869 - protein, 11 aa, Artificial
  IGFBP-2 heparin binding domain-containing peptide sequence
HHHIGVNNPKH

SEQ ID NO: 2870 - protein, 11 aa, Artificial
  IGFBP-2 heparin binding domain-containing peptide sequence
KKHIGVNNPKH

SEQ ID NO: 2871 - protein, 11 aa, Artificial
  IGFBP-2 heparin binding domain-containing peptide sequence
RKHIGVNNPKH

SEQ ID NO: 2872 - protein, 11 aa, Artificial
  IGFBP-2 heparin binding domain-containing peptide sequence
HKHIGVNNPKH

SEQ ID NO: 2873 - protein, 11 aa, Artificial
  IGFBP-2 heparin binding domain-containing peptide sequence
KRHIGVNNPKH

SEQ ID NO: 2874 - protein, 11 aa, Artificial
  IGFBP-2 heparin binding domain-containing peptide sequence
RRHIGVNNPKH

SEQ ID NO: 2875 - protein, 11 aa, Artificial
  IGFBP-2 heparin binding domain-containing peptide sequence
HRHIGVNNPKH

SEQ ID NO: 2876 - protein, 11 aa, Artificial
  IGFBP-2 heparin binding domain-containing peptide sequence
KHKIGVNNPKH

SEQ ID NO: 2877 - protein, 11 aa, Artificial
  IGFBP-2 heparin binding domain-containing peptide sequence
RHKIGVNNPKH

SEQ ID NO: 2878 - protein, 11 aa, Artificial
  IGFBP-2 heparin binding domain-containing peptide sequence
HHKIGVNNPKH

SEQ ID NO: 2879 - protein, 11 aa, Artificial
  IGFBP-2 heparin binding domain-containing peptide sequence
KKKIGVNNPKH

SEQ ID NO: 2880 - protein, 11 aa, Artificial
  IGFBP-2 heparin binding domain-containing peptide sequence
RKKIGVNNPKH

SEQ ID NO: 2881 - protein, 11 aa, Artificial
  IGFBP-2 heparin binding domain-containing peptide sequence
HKKIGVNNPKH

SEQ ID NO: 2882 - protein, 11 aa, Artificial
  IGFBP-2 heparin binding domain-containing peptide sequence
KRKIGVNNPKH

SEQ ID NO: 2883 - protein, 11 aa, Artificial
  IGFBP-2 heparin binding domain-containing peptide sequence
RRKIGVNNPKH

SEQ ID NO: 2884 - protein, 11 aa, Artificial
  IGFBP-2 heparin binding domain-containing peptide sequence
HRKIGVNNPKH

SEQ ID NO: 2885 - protein, 11 aa, Artificial
  IGFBP-2 heparin binding domain-containing peptide sequence
KHRIGVNNPKH

SEQ ID NO: 2886 - protein, 11 aa, Artificial
  IGFBP-2 heparin binding domain-containing peptide sequence
RHRIGVNNPKH

SEQ ID NO: 2887 - protein, 11 aa, Artificial
  IGFBP-2 heparin binding domain-containing peptide sequence
HHRIGVNNPKH

SEQ ID NO: 2888 - protein, 11 aa, Artificial
  IGFBP-2 heparin binding domain-containing peptide sequence
KKRIGVNNPKH

SEQ ID NO: 2889 - protein, 11 aa, Artificial
  IGFBP-2 heparin binding domain-containing peptide sequence
RKRIGVNNPKH

SEQ ID NO: 2890 - protein, 11 aa, Artificial
  IGFBP-2 heparin binding domain-containing peptide sequence
HKRIGVNNPKH

SEQ ID NO: 2891 - protein, 11 aa, Artificial
  IGFBP-2 heparin binding domain-containing peptide sequence
KRRIGVNNPKH

SEQ ID NO: 2892 - protein, 11 aa, Artificial
  IGFBP-2 heparin binding domain-containing peptide sequence
RRRIGVNNPKH

SEQ ID NO: 2893 - protein, 11 aa, Artificial
  IGFBP-2 heparin binding domain-containing peptide sequence
HRRIGVNNPKH

SEQ ID NO: 2894 - protein, 11 aa, Artificial
  IGFBP-2 heparin binding domain-containing peptide sequence
KHHVGVNNPKH

SEQ ID NO: 2895 - protein, 11 aa, Artificial
  IGFBP-2 heparin binding domain-containing peptide sequence
RHHVGVNNPKH

SEQ ID NO: 2896 - protein, 11 aa, Artificial
  IGFBP-2 heparin binding domain-containing peptide sequence
HHHVGVNNPKH

SEQ ID NO: 2897 - protein, 11 aa, Artificial
  IGFBP-2 heparin binding domain-containing peptide sequence
KKHVGVNNPKH

SEQ ID NO: 2898 - protein, 11 aa, Artificial
  IGFBP-2 heparin binding domain-containing peptide sequence
RKHVGVNNPKH

SEQ ID NO: 2899 - protein, 11 aa, Artificial
  IGFBP-2 heparin binding domain-containing peptide sequence
HKHVGVNNPKH

SEQ ID NO: 2900 - protein, 11 aa, Artificial
  IGFBP-2 heparin binding domain-containing peptide sequence
KRHVGVNNPKH

SEQ ID NO: 2901 - protein, 11 aa, Artificial
  IGFBP-2 heparin binding domain-containing peptide sequence
RRHVGVNNPKH

SEQ ID NO: 2902 - protein, 11 aa, Artificial
  IGFBP-2 heparin binding domain-containing peptide sequence
HRHVGVNNPKH

SEQ ID NO: 2903 - protein, 11 aa, Artificial
  IGFBP-2 heparin binding domain-containing peptide sequence
KHKVGVNNPKH

SEQ ID NO: 2904 - protein, 11 aa, Artificial
  IGFBP-2 heparin binding domain-containing peptide sequence
RHKVGVNNPKH

SEQ ID NO: 2905 - protein, 11 aa, Artificial
  IGFBP-2 heparin binding domain-containing peptide sequence
HHKVGVNNPKH

SEQ ID NO: 2906 - protein, 11 aa, Artificial
  IGFBP-2 heparin binding domain-containing peptide sequence
KKKVGVNNPKH

SEQ ID NO: 2907 - protein, 11 aa, Artificial
  IGFBP-2 heparin binding domain-containing peptide sequence
RKKVGVNNPKH

SEQ ID NO: 2908 - protein, 11 aa, Artificial
  IGFBP-2 heparin binding domain-containing peptide sequence
HKKVGVNNPKH

SEQ ID NO: 2909 - protein, 11 aa, Artificial
  IGFBP-2 heparin binding domain-containing peptide sequence
KRKVGVNNPKH

SEQ ID NO: 2910 - protein, 11 aa, Artificial
  IGFBP-2 heparin binding domain-containing peptide sequence
RRKVGVNNPKH

SEQ ID NO: 2911 - protein, 11 aa, Artificial
  IGFBP-2 heparin binding domain-containing peptide sequence
HRKVGVNNPKH

SEQ ID NO: 2912 - protein, 11 aa, Artificial
  IGFBP-2 heparin binding domain-containing peptide sequence
KHRVGVNNPKH

SEQ ID NO: 2913 - protein, 11 aa, Artificial
  IGFBP-2 heparin binding domain-containing peptide sequence
RHRVGVNNPKH

SEQ ID NO: 2914 - protein, 11 aa, Artificial
  IGFBP-2 heparin binding domain-containing peptide sequence
HHRVGVNNPKH

SEQ ID NO: 2915 - protein, 11 aa, Artificial
  IGFBP-2 heparin binding domain-containing peptide sequence
KKRVGVNNPKH

SEQ ID NO: 2916 - protein, 11 aa, Artificial
  IGFBP-2 heparin binding domain-containing peptide sequence
RKRVGVNNPKH

SEQ ID NO: 2917 - protein, 11 aa, Artificial
  IGFBP-2 heparin binding domain-containing peptide sequence
HKRVGVNNPKH

SEQ ID NO: 2918 - protein, 11 aa, Artificial
  IGFBP-2 heparin binding domain-containing peptide sequence
KRRVGVNNPKH

SEQ ID NO: 2919 - protein, 11 aa, Artificial
  IGFBP-2 heparin binding domain-containing peptide sequence
RRRVGVNNPKH

SEQ ID NO: 2920 - protein, 11 aa, Artificial
  IGFBP-2 heparin binding domain-containing peptide sequence
HRRVGVNNPKH

SEQ ID NO: 2921 - protein, 11 aa, Artificial
  IGFBP-2 heparin binding domain-containing peptide sequence
KHHLGLEEPRK

SEQ ID NO: 2922 - protein, 11 aa, Artificial
  IGFBP-2 heparin binding domain-containing peptide sequence
RHHLGLEEPRK

SEQ ID NO: 2923 - protein, 11 aa, Artificial
  IGFBP-2 heparin binding domain-containing peptide sequence
HHHLGLEEPRK

SEQ ID NO: 2924 - protein, 11 aa, Artificial
  IGFBP-2 heparin binding domain-containing peptide sequence
KKHLGLEEPRK

SEQ ID NO: 2925 - protein, 11 aa, Artificial
  IGFBP-2 heparin binding domain-containing peptide sequence
RKHLGLEEPRK

SEQ ID NO: 2926 - protein, 11 aa, Artificial
  IGFBP-2 heparin binding domain-containing peptide sequence
HKHLGLEEPRK

SEQ ID NO: 2927 - protein, 11 aa, Artificial
  IGFBP-2 heparin binding domain-containing peptide sequence
KRHLGLEEPRK

SEQ ID NO: 2928 - protein, 11 aa, Artificial
  IGFBP-2 heparin binding domain-containing peptide sequence
RRHLGLEEPRK

SEQ ID NO: 2929 - protein, 11 aa, Artificial
  IGFBP-2 heparin binding domain-containing peptide sequence
HRHLGLEEPRK

SEQ ID NO: 2930 - protein, 11 aa, Artificial
  IGFBP-2 heparin binding domain-containing peptide sequence
KHKLGLEEPRK

SEQ ID NO: 2931 - protein, 11 aa, Artificial
  IGFBP-2 heparin binding domain-containing peptide sequence
RHKLGLEEPRK

SEQ ID NO: 2932 - protein, 11 aa, Artificial
  IGFBP-2 heparin binding domain-containing peptide sequence
HHKLGLEEPRK

SEQ ID NO: 2933 - protein, 11 aa, Artificial
  IGFBP-2 heparin binding domain-containing peptide sequence
KKKLGLEEPRK

SEQ ID NO: 2934 - protein, 11 aa, Artificial
  IGFBP-2 heparin binding domain-containing peptide sequence
RKKLGLEEPRK

SEQ ID NO: 2935 - protein, 11 aa, Artificial
  IGFBP-2 heparin binding domain-containing peptide sequence
HKKLGLEEPRK

SEQ ID NO: 2936 - protein, 11 aa, Artificial
  IGFBP-2 heparin binding domain-containing peptide sequence
KRKLGLEEPRK

SEQ ID NO: 2937 - protein, 11 aa, Artificial
  IGFBP-2 heparin binding domain-containing peptide sequence
RRKLGLEEPRK

SEQ ID NO: 2938 - protein, 11 aa, Artificial
  IGFBP-2 heparin binding domain-containing peptide sequence
HRKLGLEEPRK

SEQ ID NO: 2939 - protein, 11 aa, Artificial
  IGFBP-2 heparin binding domain-containing peptide sequence
KHRLGLEEPRK

SEQ ID NO: 2940 - protein, 11 aa, Artificial
  IGFBP-2 heparin binding domain-containing peptide sequence
RHRLGLEEPRK

SEQ ID NO: 2941 - protein, 11 aa, Artificial
  IGFBP-2 heparin binding domain-containing peptide sequence
HHRLGLEEPRK

SEQ ID NO: 2942 - protein, 11 aa, Artificial
  IGFBP-2 heparin binding domain-containing peptide sequence
KKRLGLEEPRK

SEQ ID NO: 2943 - protein, 11 aa, Artificial
  IGFBP-2 heparin binding domain-containing peptide sequence
RKRLGLEEPRK

SEQ ID NO: 2944 - protein, 11 aa, Artificial
  IGFBP-2 heparin binding domain-containing peptide sequence
HKRLGLEEPRK

SEQ ID NO: 2945 - protein, 11 aa, Artificial
  IGFBP-2 heparin binding domain-containing peptide sequence
KRRLGLEEPRK

SEQ ID NO: 2946 - protein, 11 aa, Artificial
  IGFBP-2 heparin binding domain-containing peptide sequence
RRRLGLEEPRK

SEQ ID NO: 2947 - protein, 11 aa, Artificial
  IGFBP-2 heparin binding domain-containing peptide sequence
HRRLGLEEPRK

SEQ ID NO: 2948 - protein, 11 aa, Artificial
  IGFBP-2 heparin binding domain-containing peptide sequence
KHHIGLEEPRK

SEQ ID NO: 2949 - protein, 11 aa, Artificial
  IGFBP-2 heparin binding domain-containing peptide sequence
RHHIGLEEPRK

SEQ ID NO: 2950 - protein, 11 aa, Artificial
  IGFBP-2 heparin binding domain-containing peptide sequence
HHHIGLEEPRK

SEQ ID NO: 2951 - protein, 11 aa, Artificial
  IGFBP-2 heparin binding domain-containing peptide sequence
KKHIGLEEPRK

SEQ ID NO: 2952 - protein, 11 aa, Artificial
  IGFBP-2 heparin binding domain-containing peptide sequence
RKHIGLEEPRK

SEQ ID NO: 2953 - protein, 11 aa, Artificial
  IGFBP-2 heparin binding domain-containing peptide sequence
HKHIGLEEPRK

SEQ ID NO: 2954 - protein, 11 aa, Artificial
  IGFBP-2 heparin binding domain-containing peptide sequence
KRHIGLEEPRK

SEQ ID NO: 2955 - protein, 11 aa, Artificial
  IGFBP-2 heparin binding domain-containing peptide sequence
RRHIGLEEPRK

SEQ ID NO: 2956 - protein, 11 aa, Artificial
  IGFBP-2 heparin binding domain-containing peptide sequence
HRHIGLEEPRK

SEQ ID NO: 2957 - protein, 11 aa, Artificial
  IGFBP-2 heparin binding domain-containing peptide sequence
KHKIGLEEPRK

SEQ ID NO: 2958 - protein, 11 aa, Artificial
  IGFBP-2 heparin binding domain-containing peptide sequence
RHKIGLEEPRK

SEQ ID NO: 2959 - protein, 11 aa, Artificial
  IGFBP-2 heparin binding domain-containing peptide sequence
HHKIGLEEPRK

SEQ ID NO: 2960 - protein, 11 aa, Artificial
  IGFBP-2 heparin binding domain-containing peptide sequence
KKKIGLEEPRK

SEQ ID NO: 2961 - protein, 11 aa, Artificial
  IGFBP-2 heparin binding domain-containing peptide sequence
RKKIGLEEPRK

SEQ ID NO: 2962 - protein, 11 aa, Artificial
  IGFBP-2 heparin binding domain-containing peptide sequence
HKKIGLEEPRK

SEQ ID NO: 2963 - protein, 11 aa, Artificial
  IGFBP-2 heparin binding domain-containing peptide sequence
KRKIGLEEPRK

SEQ ID NO: 2964 - protein, 11 aa, Artificial
  IGFBP-2 heparin binding domain-containing peptide sequence
RRKIGLEEPRK

SEQ ID NO: 2965 - protein, 11 aa, Artificial
  IGFBP-2 heparin binding domain-containing peptide sequence
HRKIGLEEPRK

SEQ ID NO: 2966 - protein, 11 aa, Artificial
  IGFBP-2 heparin binding domain-containing peptide sequence
KHRIGLEEPRK

SEQ ID NO: 2967 - protein, 11 aa, Artificial
  IGFBP-2 heparin binding domain-containing peptide sequence
RHRIGLEEPRK

SEQ ID NO: 2968 - protein, 11 aa, Artificial
  IGFBP-2 heparin binding domain-containing peptide sequence
HHRIGLEEPRK

SEQ ID NO: 2969 - protein, 11 aa, Artificial
  IGFBP-2 heparin binding domain-containing peptide sequence
KKRIGLEEPRK

SEQ ID NO: 2970 - protein, 11 aa, Artificial
  IGFBP-2 heparin binding domain-containing peptide sequence
RKRIGLEEPRK

SEQ ID NO: 2971 - protein, 11 aa, Artificial
  IGFBP-2 heparin binding domain-containing peptide sequence
HKRIGLEEPRK

SEQ ID NO: 2972 - protein, 11 aa, Artificial
  IGFBP-2 heparin binding domain-containing peptide sequence
KRRIGLEEPRK

SEQ ID NO: 2973 - protein, 11 aa, Artificial
  IGFBP-2 heparin binding domain-containing peptide sequence
RRRIGLEEPRK

SEQ ID NO: 2974 - protein, 11 aa, Artificial
  IGFBP-2 heparin binding domain-containing peptide sequence
HRRIGLEEPRK

SEQ ID NO: 2975 - protein, 11 aa, Artificial
  IGFBP-2 heparin binding domain-containing peptide sequence
KHHVGLEEPRK

SEQ ID NO: 2976 - protein, 11 aa, Artificial
  IGFBP-2 heparin binding domain-containing peptide sequence
RHHVGLEEPRK

SEQ ID NO: 2977 - protein, 11 aa, Artificial
  IGFBP-2 heparin binding domain-containing peptide sequence
HHHVGLEEPRK

SEQ ID NO: 2978 - protein, 11 aa, Artificial
  IGFBP-2 heparin binding domain-containing peptide sequence
KKHVGLEEPRK

SEQ ID NO: 2979 - protein, 11 aa, Artificial
  IGFBP-2 heparin binding domain-containing peptide sequence
RKHVGLEEPRK

SEQ ID NO: 2980 - protein, 11 aa, Artificial
  IGFBP-2 heparin binding domain-containing peptide sequence
HKHVGLEEPRK

SEQ ID NO: 2981 - protein, 11 aa, Artificial
  IGFBP-2 heparin binding domain-containing peptide sequence
KRHVGLEEPRK

SEQ ID NO: 2982 - protein, 11 aa, Artificial
  IGFBP-2 heparin binding domain-containing peptide sequence
RRHVGLEEPRK

SEQ ID NO: 2983 - protein, 11 aa, Artificial
  IGFBP-2 heparin binding domain-containing peptide sequence
HRHVGLEEPRK

SEQ ID NO: 2984 - protein, 11 aa, Artificial
  IGFBP-2 heparin binding domain-containing peptide sequence
KHKVGLEEPRK

SEQ ID NO: 2985 - protein, 11 aa, Artificial
  IGFBP-2 heparin binding domain-containing peptide sequence
RHKVGLEEPRK

SEQ ID NO: 2986 - protein, 11 aa, Artificial
  IGFBP-2 heparin binding domain-containing peptide sequence
HHKVGLEEPRK

SEQ ID NO: 2987 - protein, 11 aa, Artificial
  IGFBP-2 heparin binding domain-containing peptide sequence
KKKVGLEEPRK

SEQ ID NO: 2988 - protein, 11 aa, Artificial
  IGFBP-2 heparin binding domain-containing peptide sequence
RKKVGLEEPRK

SEQ ID NO: 2989 - protein, 11 aa, Artificial
  IGFBP-2 heparin binding domain-containing peptide sequence
HKKVGLEEPRK

SEQ ID NO: 2990 - protein, 11 aa, Artificial
  IGFBP-2 heparin binding domain-containing peptide sequence
KRKVGLEEPRK

SEQ ID NO: 2991 - protein, 11 aa, Artificial
  IGFBP-2 heparin binding domain-containing peptide sequence
RRKVGLEEPRK

SEQ ID NO: 2992 - protein, 11 aa, Artificial
  IGFBP-2 heparin binding domain-containing peptide sequence
HRKVGLEEPRK

SEQ ID NO: 2993 - protein, 11 aa, Artificial
  IGFBP-2 heparin binding domain-containing peptide sequence
KHRVGLEEPRK

SEQ ID NO: 2994 - protein, 11 aa, Artificial
  IGFBP-2 heparin binding domain-containing peptide sequence
RHRVGLEEPRK

SEQ ID NO: 2995 - protein, 11 aa, Artificial
  IGFBP-2 heparin binding domain-containing peptide sequence
HHRVGLEEPRK

SEQ ID NO: 2996 - protein, 11 aa, Artificial
  IGFBP-2 heparin binding domain-containing peptide sequence
KKRVGLEEPRK

SEQ ID NO: 2997 - protein, 11 aa, Artificial
  IGFBP-2 heparin binding domain-containing peptide sequence
RKRVGLEEPRK

SEQ ID NO: 2998 - protein, 11 aa, Artificial
  IGFBP-2 heparin binding domain-containing peptide sequence
HKRVGLEEPRK

SEQ ID NO: 2999 - protein, 11 aa, Artificial
  IGFBP-2 heparin binding domain-containing peptide sequence
KRRVGLEEPRK

SEQ ID NO: 3000 - protein, 11 aa, Artificial
  IGFBP-2 heparin binding domain-containing peptide sequence
RRRVGLEEPRK

SEQ ID NO: 3001 - protein, 11 aa, Artificial
  IGFBP-2 heparin binding domain-containing peptide sequence
HRRVGLEEPRK

SEQ ID NO: 3002 - protein, 11 aa, Artificial
  IGFBP-2 heparin binding domain-containing peptide sequence
KHHLGIEEPRK

SEQ ID NO: 3003 - protein, 11 aa, Artificial
  IGFBP-2 heparin binding domain-containing peptide sequence
RHHLGIEEPRK

SEQ ID NO: 3004 - protein, 11 aa, Artificial
  IGFBP-2 heparin binding domain-containing peptide sequence
HHHLGIEEPRK

SEQ ID NO: 3005 - protein, 11 aa, Artificial
  IGFBP-2 heparin binding domain-containing peptide sequence
KKHLGIEEPRK

SEQ ID NO: 3006 - protein, 11 aa, Artificial
  IGFBP-2 heparin binding domain-containing peptide sequence
RKHLGIEEPRK

SEQ ID NO: 3007 - protein, 11 aa, Artificial
  IGFBP-2 heparin binding domain-containing peptide sequence
HKHLGIEEPRK

SEQ ID NO: 3008 - protein, 11 aa, Artificial
  IGFBP-2 heparin binding domain-containing peptide sequence
KRHLGIEEPRK

SEQ ID NO: 3009 - protein, 11 aa, Artificial
  IGFBP-2 heparin binding domain-containing peptide sequence
RRHLGIEEPRK

SEQ ID NO: 3010 - protein, 11 aa, Artificial
  IGFBP-2 heparin binding domain-containing peptide sequence
HRHLGIEEPRK

SEQ ID NO: 3011 - protein, 11 aa, Artificial
  IGFBP-2 heparin binding domain-containing peptide sequence
KHKLGIEEPRK

SEQ ID NO: 3012 - protein, 11 aa, Artificial
  IGFBP-2 heparin binding domain-containing peptide sequence
RHKLGIEEPRK

SEQ ID NO: 3013 - protein, 11 aa, Artificial
  IGFBP-2 heparin binding domain-containing peptide sequence
HHKLGIEEPRK

SEQ ID NO: 3014 - protein, 11 aa, Artificial
  IGFBP-2 heparin binding domain-containing peptide sequence
KKKLGIEEPRK

SEQ ID NO: 3015 - protein, 11 aa, Artificial
  IGFBP-2 heparin binding domain-containing peptide sequence
RKKLGIEEPRK

SEQ ID NO: 3016 - protein, 11 aa, Artificial
  IGFBP-2 heparin binding domain-containing peptide sequence
HKKLGIEEPRK

SEQ ID NO: 3017 - protein, 11 aa, Artificial
  IGFBP-2 heparin binding domain-containing peptide sequence
KRKLGIEEPRK

SEQ ID NO: 3018 - protein, 11 aa, Artificial
  IGFBP-2 heparin binding domain-containing peptide sequence
RRKLGIEEPRK

SEQ ID NO: 3019 - protein, 11 aa, Artificial
  IGFBP-2 heparin binding domain-containing peptide sequence
HRKLGIEEPRK

SEQ ID NO: 3020 - protein, 11 aa, Artificial
  IGFBP-2 heparin binding domain-containing peptide sequence
KHRLGIEEPRK

SEQ ID NO: 3021 - protein, 11 aa, Artificial
  IGFBP-2 heparin binding domain-containing peptide sequence
RHRLGIEEPRK

SEQ ID NO: 3022 - protein, 11 aa, Artificial
  IGFBP-2 heparin binding domain-containing peptide sequence
HHRLGIEEPRK

SEQ ID NO: 3023 - protein, 11 aa, Artificial
  IGFBP-2 heparin binding domain-containing peptide sequence
KKRLGIEEPRK

SEQ ID NO: 3024 - protein, 11 aa, Artificial
  IGFBP-2 heparin binding domain-containing peptide sequence
RKRLGIEEPRK

SEQ ID NO: 3025 - protein, 11 aa, Artificial
  IGFBP-2 heparin binding domain-containing peptide sequence
HKRLGIEEPRK

SEQ ID NO: 3026 - protein, 11 aa, Artificial
  IGFBP-2 heparin binding domain-containing peptide sequence
KRRLGIEEPRK

SEQ ID NO: 3027 - protein, 11 aa, Artificial
  IGFBP-2 heparin binding domain-containing peptide sequence
RRRLGIEEPRK

SEQ ID NO: 3028 - protein, 11 aa, Artificial
  IGFBP-2 heparin binding domain-containing peptide sequence
HRRLGIEEPRK

SEQ ID NO: 3029 - protein, 11 aa, Artificial
  IGFBP-2 heparin binding domain-containing peptide sequence
KHHIGIEEPRK

SEQ ID NO: 3030 - protein, 11 aa, Artificial
  IGFBP-2 heparin binding domain-containing peptide sequence
RHHIGIEEPRK

SEQ ID NO: 3031 - protein, 11 aa, Artificial
  IGFBP-2 heparin binding domain-containing peptide sequence
HHHIGIEEPRK

SEQ ID NO: 3032 - protein, 11 aa, Artificial
  IGFBP-2 heparin binding domain-containing peptide sequence
KKHIGIEEPRK

SEQ ID NO: 3033 - protein, 11 aa, Artificial
  IGFBP-2 heparin binding domain-containing peptide sequence
RKHIGIEEPRK

SEQ ID NO: 3034 - protein, 11 aa, Artificial
  IGFBP-2 heparin binding domain-containing peptide sequence
HKHIGIEEPRK

SEQ ID NO: 3035 - protein, 11 aa, Artificial
  IGFBP-2 heparin binding domain-containing peptide sequence
KRHIGIEEPRK

SEQ ID NO: 3036 - protein, 11 aa, Artificial
  IGFBP-2 heparin binding domain-containing peptide sequence
RRHIGIEEPRK

SEQ ID NO: 3037 - protein, 11 aa, Artificial
  IGFBP-2 heparin binding domain-containing peptide sequence
HRHIGIEEPRK

SEQ ID NO: 3038 - protein, 11 aa, Artificial
  IGFBP-2 heparin binding domain-containing peptide sequence
KHKIGIEEPRK

SEQ ID NO: 3039 - protein, 11 aa, Artificial
  IGFBP-2 heparin binding domain-containing peptide sequence
RHKIGIEEPRK

SEQ ID NO: 3040 - protein, 11 aa, Artificial
  IGFBP-2 heparin binding domain-containing peptide sequence
HHKIGIEEPRK

SEQ ID NO: 3041 - protein, 11 aa, Artificial
  IGFBP-2 heparin binding domain-containing peptide sequence
KKKIGIEEPRK

SEQ ID NO: 3042 - protein, 11 aa, Artificial
  IGFBP-2 heparin binding domain-containing peptide sequence
RKKIGIEEPRK

SEQ ID NO: 3043 - protein, 11 aa, Artificial
  IGFBP-2 heparin binding domain-containing peptide sequence
HKKIGIEEPRK

SEQ ID NO: 3044 - protein, 11 aa, Artificial
  IGFBP-2 heparin binding domain-containing peptide sequence
KRKIGIEEPRK

SEQ ID NO: 3045 - protein, 11 aa, Artificial
  IGFBP-2 heparin binding domain-containing peptide sequence
RRKIGIEEPRK

SEQ ID NO: 3046 - protein, 11 aa, Artificial
  IGFBP-2 heparin binding domain-containing peptide sequence
HRKIGIEEPRK

SEQ ID NO: 3047 - protein, 11 aa, Artificial
  IGFBP-2 heparin binding domain-containing peptide sequence
KHRIGIEEPRK

SEQ ID NO: 3048 - protein, 11 aa, Artificial
  IGFBP-2 heparin binding domain-containing peptide sequence
RHRIGIEEPRK

SEQ ID NO: 3049 - protein, 11 aa, Artificial
  IGFBP-2 heparin binding domain-containing peptide sequence
HHRIGIEEPRK

SEQ ID NO: 3050 - protein, 11 aa, Artificial
  IGFBP-2 heparin binding domain-containing peptide sequence
KKRIGIEEPRK

SEQ ID NO: 3051 - protein, 11 aa, Artificial
  IGFBP-2 heparin binding domain-containing peptide sequence
RKRIGIEEPRK

SEQ ID NO: 3052 - protein, 11 aa, Artificial
  IGFBP-2 heparin binding domain-containing peptide sequence
HKRIGIEEPRK

SEQ ID NO: 3053 - protein, 11 aa, Artificial
  IGFBP-2 heparin binding domain-containing peptide sequence
KRRIGIEEPRK

SEQ ID NO: 3054 - protein, 11 aa, Artificial
  IGFBP-2 heparin binding domain-containing peptide sequence
RRRIGIEEPRK

SEQ ID NO: 3055 - protein, 11 aa, Artificial
  IGFBP-2 heparin binding domain-containing peptide sequence
HRRIGIEEPRK

SEQ ID NO: 3056 - protein, 11 aa, Artificial
  IGFBP-2 heparin binding domain-containing peptide sequence
KHHVGIEEPRK

SEQ ID NO: 3057 - protein, 11 aa, Artificial
  IGFBP-2 heparin binding domain-containing peptide sequence
RHHVGIEEPRK

SEQ ID NO: 3058 - protein, 11 aa, Artificial
  IGFBP-2 heparin binding domain-containing peptide sequence
HHHVGIEEPRK

SEQ ID NO: 3059 - protein, 11 aa, Artificial
  IGFBP-2 heparin binding domain-containing peptide sequence
KKHVGIEEPRK

SEQ ID NO: 3060 - protein, 11 aa, Artificial
  IGFBP-2 heparin binding domain-containing peptide sequence
RKHVGIEEPRK

SEQ ID NO: 3061 - protein, 11 aa, Artificial
  IGFBP-2 heparin binding domain-containing peptide sequence
HKHVGIEEPRK

SEQ ID NO: 3062 - protein, 11 aa, Artificial
  IGFBP-2 heparin binding domain-containing peptide sequence
KRHVGIEEPRK

SEQ ID NO: 3063 - protein, 11 aa, Artificial
  IGFBP-2 heparin binding domain-containing peptide sequence
RRHVGIEEPRK

SEQ ID NO: 3064 - protein, 11 aa, Artificial
  IGFBP-2 heparin binding domain-containing peptide sequence
HRHVGIEEPRK

SEQ ID NO: 3065 - protein, 11 aa, Artificial
  IGFBP-2 heparin binding domain-containing peptide sequence
KHKVGIEEPRK

SEQ ID NO: 3066 - protein, 11 aa, Artificial
  IGFBP-2 heparin binding domain-containing peptide sequence
RHKVGIEEPRK

SEQ ID NO: 3067 - protein, 11 aa, Artificial
  IGFBP-2 heparin binding domain-containing peptide sequence
HHKVGIEEPRK

SEQ ID NO: 3068 - protein, 11 aa, Artificial
  IGFBP-2 heparin binding domain-containing peptide sequence
KKKVGIEEPRK

SEQ ID NO: 3069 - protein, 11 aa, Artificial
  IGFBP-2 heparin binding domain-containing peptide sequence
RKKVGIEEPRK

SEQ ID NO: 3070 - protein, 11 aa, Artificial
  IGFBP-2 heparin binding domain-containing peptide sequence
HKKVGIEEPRK

SEQ ID NO: 3071 - protein, 11 aa, Artificial
  IGFBP-2 heparin binding domain-containing peptide sequence
KRKVGIEEPRK

SEQ ID NO: 3072 - protein, 11 aa, Artificial
  IGFBP-2 heparin binding domain-containing peptide sequence
RRKVGIEEPRK

SEQ ID NO: 3073 - protein, 11 aa, Artificial
  IGFBP-2 heparin binding domain-containing peptide sequence
HRKVGIEEPRK

SEQ ID NO: 3074 - protein, 11 aa, Artificial
  IGFBP-2 heparin binding domain-containing peptide sequence
KHRVGIEEPRK

SEQ ID NO: 3075 - protein, 11 aa, Artificial
  IGFBP-2 heparin binding domain-containing peptide sequence
RHRVGIEEPRK

SEQ ID NO: 3076 - protein, 11 aa, Artificial
  IGFBP-2 heparin binding domain-containing peptide sequence
HHRVGIEEPRK

SEQ ID NO: 3077 - protein, 11 aa, Artificial
  IGFBP-2 heparin binding domain-containing peptide sequence
KKRVGIEEPRK

SEQ ID NO: 3078 - protein, 11 aa, Artificial
  IGFBP-2 heparin binding domain-containing peptide sequence
RKRVGIEEPRK

SEQ ID NO: 3079 - protein, 11 aa, Artificial
  IGFBP-2 heparin binding domain-containing peptide sequence
HKRVGIEEPRK

SEQ ID NO: 3080 - protein, 11 aa, Artificial
  IGFBP-2 heparin binding domain-containing peptide sequence
KRRVGIEEPRK

SEQ ID NO: 3081 - protein, 11 aa, Artificial
  IGFBP-2 heparin binding domain-containing peptide sequence
RRRVGIEEPRK

SEQ ID NO: 3082 - protein, 11 aa, Artificial
  IGFBP-2 heparin binding domain-containing peptide sequence
HRRVGIEEPRK

SEQ ID NO: 3083 - protein, 11 aa, Artificial
  IGFBP-2 heparin binding domain-containing peptide sequence
KHHLGVEEPRK

SEQ ID NO: 3084 - protein, 11 aa, Artificial
  IGFBP-2 heparin binding domain-containing peptide sequence
RHHLGVEEPRK

SEQ ID NO: 3085 - protein, 11 aa, Artificial
  IGFBP-2 heparin binding domain-containing peptide sequence
HHHLGVEEPRK

SEQ ID NO: 3086 - protein, 11 aa, Artificial
  IGFBP-2 heparin binding domain-containing peptide sequence
KKHLGVEEPRK

SEQ ID NO: 3087 - protein, 11 aa, Artificial
  IGFBP-2 heparin binding domain-containing peptide sequence
RKHLGVEEPRK

SEQ ID NO: 3088 - protein, 11 aa, Artificial
  IGFBP-2 heparin binding domain-containing peptide sequence
HKHLGVEEPRK

SEQ ID NO: 3089 - protein, 11 aa, Artificial
  IGFBP-2 heparin binding domain-containing peptide sequence
KRHLGVEEPRK

SEQ ID NO: 3090 - protein, 11 aa, Artificial
  IGFBP-2 heparin binding domain-containing peptide sequence
RRHLGVEEPRK

SEQ ID NO: 3091 - protein, 11 aa, Artificial
  IGFBP-2 heparin binding domain-containing peptide sequence
HRHLGVEEPRK

SEQ ID NO: 3092 - protein, 11 aa, Artificial
  IGFBP-2 heparin binding domain-containing peptide sequence
KHKLGVEEPRK

SEQ ID NO: 3093 - protein, 11 aa, Artificial
  IGFBP-2 heparin binding domain-containing peptide sequence
RHKLGVEEPRK

SEQ ID NO: 3094 - protein, 11 aa, Artificial
  IGFBP-2 heparin binding domain-containing peptide sequence
HHKLGVEEPRK

SEQ ID NO: 3095 - protein, 11 aa, Artificial
  IGFBP-2 heparin binding domain-containing peptide sequence
KKKLGVEEPRK

SEQ ID NO: 3096 - protein, 11 aa, Artificial
  IGFBP-2 heparin binding domain-containing peptide sequence
RKKLGVEEPRK

SEQ ID NO: 3097 - protein, 11 aa, Artificial
  IGFBP-2 heparin binding domain-containing peptide sequence
HKKLGVEEPRK

SEQ ID NO: 3098 - protein, 11 aa, Artificial
  IGFBP-2 heparin binding domain-containing peptide sequence
KRKLGVEEPRK

SEQ ID NO: 3099 - protein, 11 aa, Artificial
  IGFBP-2 heparin binding domain-containing peptide sequence
RRKLGVEEPRK

SEQ ID NO: 3100 - protein, 11 aa, Artificial
  IGFBP-2 heparin binding domain-containing peptide sequence
HRKLGVEEPRK

SEQ ID NO: 3101 - protein, 11 aa, Artificial
  IGFBP-2 heparin binding domain-containing peptide sequence
KHRLGVEEPRK

SEQ ID NO: 3102 - protein, 11 aa, Artificial
  IGFBP-2 heparin binding domain-containing peptide sequence
RHRLGVEEPRK

SEQ ID NO: 3103 - protein, 11 aa, Artificial
  IGFBP-2 heparin binding domain-containing peptide sequence
HHRLGVEEPRK

SEQ ID NO: 3104 - protein, 11 aa, Artificial
  IGFBP-2 heparin binding domain-containing peptide sequence
KKRLGVEEPRK

SEQ ID NO: 3105 - protein, 11 aa, Artificial
  IGFBP-2 heparin binding domain-containing peptide sequence
RKRLGVEEPRK

SEQ ID NO: 3106 - protein, 11 aa, Artificial
  IGFBP-2 heparin binding domain-containing peptide sequence
HKRLGVEEPRK

SEQ ID NO: 3107 - protein, 11 aa, Artificial
  IGFBP-2 heparin binding domain-containing peptide sequence
KRRLGVEEPRK

SEQ ID NO: 3108 - protein, 11 aa, Artificial
  IGFBP-2 heparin binding domain-containing peptide sequence
RRRLGVEEPRK

SEQ ID NO: 3109 - protein, 11 aa, Artificial
  IGFBP-2 heparin binding domain-containing peptide sequence
HRRLGVEEPRK

SEQ ID NO: 3110 - protein, 11 aa, Artificial
  IGFBP-2 heparin binding domain-containing peptide sequence
KHHIGVEEPRK

SEQ ID NO: 3111 - protein, 11 aa, Artificial
  IGFBP-2 heparin binding domain-containing peptide sequence
RHHIGVEEPRK

SEQ ID NO: 3112 - protein, 11 aa, Artificial
  IGFBP-2 heparin binding domain-containing peptide sequence
HHHIGVEEPRK

SEQ ID NO: 3113 - protein, 11 aa, Artificial
  IGFBP-2 heparin binding domain-containing peptide sequence
KKHIGVEEPRK

SEQ ID NO: 3114 - protein, 11 aa, Artificial
  IGFBP-2 heparin binding domain-containing peptide sequence
RKHIGVEEPRK

SEQ ID NO: 3115 - protein, 11 aa, Artificial
  IGFBP-2 heparin binding domain-containing peptide sequence
HKHIGVEEPRK

SEQ ID NO: 3116 - protein, 11 aa, Artificial
  IGFBP-2 heparin binding domain-containing peptide sequence
KRHIGVEEPRK

SEQ ID NO: 3117 - protein, 11 aa, Artificial
  IGFBP-2 heparin binding domain-containing peptide sequence
RRHIGVEEPRK

SEQ ID NO: 3118 - protein, 11 aa, Artificial
  IGFBP-2 heparin binding domain-containing peptide sequence
HRHIGVEEPRK

SEQ ID NO: 3119 - protein, 11 aa, Artificial
  IGFBP-2 heparin binding domain-containing peptide sequence
KHKIGVEEPRK

SEQ ID NO: 3120 - protein, 11 aa, Artificial
  IGFBP-2 heparin binding domain-containing peptide sequence
RHKIGVEEPRK

SEQ ID NO: 3121 - protein, 11 aa, Artificial
  IGFBP-2 heparin binding domain-containing peptide sequence
HHKIGVEEPRK

SEQ ID NO: 3122 - protein, 11 aa, Artificial
  IGFBP-2 heparin binding domain-containing peptide sequence
KKKIGVEEPRK

SEQ ID NO: 3123 - protein, 11 aa, Artificial
  IGFBP-2 heparin binding domain-containing peptide sequence
RKKIGVEEPRK

SEQ ID NO: 3124 - protein, 11 aa, Artificial
  IGFBP-2 heparin binding domain-containing peptide sequence
HKKIGVEEPRK

SEQ ID NO: 3125 - protein, 11 aa, Artificial
  IGFBP-2 heparin binding domain-containing peptide sequence
KRKIGVEEPRK

SEQ ID NO: 3126 - protein, 11 aa, Artificial
  IGFBP-2 heparin binding domain-containing peptide sequence
RRKIGVEEPRK

SEQ ID NO: 3127 - protein, 11 aa, Artificial
  IGFBP-2 heparin binding domain-containing peptide sequence
HRKIGVEEPRK

SEQ ID NO: 3128 - protein, 11 aa, Artificial
  IGFBP-2 heparin binding domain-containing peptide sequence
KHRIGVEEPRK

SEQ ID NO: 3129 - protein, 11 aa, Artificial
  IGFBP-2 heparin binding domain-containing peptide sequence
RHRIGVEEPRK

SEQ ID NO: 3130 - protein, 11 aa, Artificial
  IGFBP-2 heparin binding domain-containing peptide sequence
HHRIGVEEPRK

SEQ ID NO: 3131 - protein, 11 aa, Artificial
  IGFBP-2 heparin binding domain-containing peptide sequence
KKRIGVEEPRK

SEQ ID NO: 3132 - protein, 11 aa, Artificial
  IGFBP-2 heparin binding domain-containing peptide sequence
RKRIGVEEPRK

SEQ ID NO: 3133 - protein, 11 aa, Artificial
  IGFBP-2 heparin binding domain-containing peptide sequence
HKRIGVEEPRK

SEQ ID NO: 3134 - protein, 11 aa, Artificial
  IGFBP-2 heparin binding domain-containing peptide sequence
KRRIGVEEPRK

SEQ ID NO: 3135 - protein, 11 aa, Artificial
  IGFBP-2 heparin binding domain-containing peptide sequence
RRRIGVEEPRK

SEQ ID NO: 3136 - protein, 11 aa, Artificial
  IGFBP-2 heparin binding domain-containing peptide sequence
HRRIGVEEPRK

SEQ ID NO: 3137 - protein, 11 aa, Artificial
  IGFBP-2 heparin binding domain-containing peptide sequence
KHHVGVEEPRK

SEQ ID NO: 3138 - protein, 11 aa, Artificial
  IGFBP-2 heparin binding domain-containing peptide sequence
RHHVGVEEPRK

SEQ ID NO: 3139 - protein, 11 aa, Artificial
  IGFBP-2 heparin binding domain-containing peptide sequence
HHHVGVEEPRK

SEQ ID NO: 3140 - protein, 11 aa, Artificial
  IGFBP-2 heparin binding domain-containing peptide sequence
KKHVGVEEPRK

SEQ ID NO: 3141 - protein, 11 aa, Artificial
  IGFBP-2 heparin binding domain-containing peptide sequence
RKHVGVEEPRK

SEQ ID NO: 3142 - protein, 11 aa, Artificial
  IGFBP-2 heparin binding domain-containing peptide sequence
HKHVGVEEPRK

SEQ ID NO: 3143 - protein, 11 aa, Artificial
  IGFBP-2 heparin binding domain-containing peptide sequence
KRHVGVEEPRK

SEQ ID NO: 3144 - protein, 11 aa, Artificial
  IGFBP-2 heparin binding domain-containing peptide sequence
RRHVGVEEPRK

SEQ ID NO: 3145 - protein, 11 aa, Artificial
  IGFBP-2 heparin binding domain-containing peptide sequence
HRHVGVEEPRK

SEQ ID NO: 3146 - protein, 11 aa, Artificial
  IGFBP-2 heparin binding domain-containing peptide sequence
KHKVGVEEPRK

SEQ ID NO: 3147 - protein, 11 aa, Artificial
  IGFBP-2 heparin binding domain-containing peptide sequence
RHKVGVEEPRK

SEQ ID NO: 3148 - protein, 11 aa, Artificial
  IGFBP-2 heparin binding domain-containing peptide sequence
HHKVGVEEPRK

SEQ ID NO: 3149 - protein, 11 aa, Artificial
  IGFBP-2 heparin binding domain-containing peptide sequence
KKKVGVEEPRK

SEQ ID NO: 3150 - protein, 11 aa, Artificial
  IGFBP-2 heparin binding domain-containing peptide sequence
RKKVGVEEPRK

SEQ ID NO: 3151 - protein, 11 aa, Artificial
  IGFBP-2 heparin binding domain-containing peptide sequence
HKKVGVEEPRK

SEQ ID NO: 3152 - protein, 11 aa, Artificial
  IGFBP-2 heparin binding domain-containing peptide sequence
KRKVGVEEPRK

SEQ ID NO: 3153 - protein, 11 aa, Artificial
  IGFBP-2 heparin binding domain-containing peptide sequence
RRKVGVEEPRK

SEQ ID NO: 3154 - protein, 11 aa, Artificial
  IGFBP-2 heparin binding domain-containing peptide sequence
HRKVGVEEPRK

SEQ ID NO: 3155 - protein, 11 aa, Artificial
  IGFBP-2 heparin binding domain-containing peptide sequence
KHRVGVEEPRK

SEQ ID NO: 3156 - protein, 11 aa, Artificial
  IGFBP-2 heparin binding domain-containing peptide sequence
RHRVGVEEPRK

SEQ ID NO: 3157 - protein, 11 aa, Artificial
  IGFBP-2 heparin binding domain-containing peptide sequence
HHRVGVEEPRK

SEQ ID NO: 3158 - protein, 11 aa, Artificial
  IGFBP-2 heparin binding domain-containing peptide sequence
KKRVGVEEPRK

SEQ ID NO: 3159 - protein, 11 aa, Artificial
  IGFBP-2 heparin binding domain-containing peptide sequence
RKRVGVEEPRK

SEQ ID NO: 3160 - protein, 11 aa, Artificial
  IGFBP-2 heparin binding domain-containing peptide sequence
HKRVGVEEPRK

SEQ ID NO: 3161 - protein, 11 aa, Artificial
  IGFBP-2 heparin binding domain-containing peptide sequence
KRRVGVEEPRK

SEQ ID NO: 3162 - protein, 11 aa, Artificial
  IGFBP-2 heparin binding domain-containing peptide sequence
RRRVGVEEPRK

SEQ ID NO: 3163 - protein, 11 aa, Artificial
  IGFBP-2 heparin binding domain-containing peptide sequence
HRRVGVEEPRK

SEQ ID NO: 3164 - protein, 11 aa, Artificial
  IGFBP-2 heparin binding domain-containing peptide sequence
KHHLGLNEPRK

SEQ ID NO: 3165 - protein, 11 aa, Artificial
  IGFBP-2 heparin binding domain-containing peptide sequence
RHHLGLNEPRK

SEQ ID NO: 3166 - protein, 11 aa, Artificial
  IGFBP-2 heparin binding domain-containing peptide sequence
HHHLGLNEPRK

SEQ ID NO: 3167 - protein, 11 aa, Artificial
  IGFBP-2 heparin binding domain-containing peptide sequence
KKHLGLNEPRK

SEQ ID NO: 3168 - protein, 11 aa, Artificial
  IGFBP-2 heparin binding domain-containing peptide sequence
RKHLGLNEPRK

SEQ ID NO: 3169 - protein, 11 aa, Artificial
  IGFBP-2 heparin binding domain-containing peptide sequence
HKHLGLNEPRK

SEQ ID NO: 3170 - protein, 11 aa, Artificial
  IGFBP-2 heparin binding domain-containing peptide sequence
KRHLGLNEPRK

SEQ ID NO: 3171 - protein, 11 aa, Artificial
  IGFBP-2 heparin binding domain-containing peptide sequence
RRHLGLNEPRK

SEQ ID NO: 3172 - protein, 11 aa, Artificial
  IGFBP-2 heparin binding domain-containing peptide sequence
HRHLGLNEPRK

SEQ ID NO: 3173 - protein, 11 aa, Artificial
  IGFBP-2 heparin binding domain-containing peptide sequence
KHKLGLNEPRK

SEQ ID NO: 3174 - protein, 11 aa, Artificial
  IGFBP-2 heparin binding domain-containing peptide sequence
RHKLGLNEPRK

SEQ ID NO: 3175 - protein, 11 aa, Artificial
  IGFBP-2 heparin binding domain-containing peptide sequence
HHKLGLNEPRK

SEQ ID NO: 3176 - protein, 11 aa, Artificial
  IGFBP-2 heparin binding domain-containing peptide sequence
KKKLGLNEPRK

SEQ ID NO: 3177 - protein, 11 aa, Artificial
  IGFBP-2 heparin binding domain-containing peptide sequence
RKKLGLNEPRK

SEQ ID NO: 3178 - protein, 11 aa, Artificial
  IGFBP-2 heparin binding domain-containing peptide sequence
HKKLGLNEPRK

SEQ ID NO: 3179 - protein, 11 aa, Artificial
  IGFBP-2 heparin binding domain-containing peptide sequence
KRKLGLNEPRK

SEQ ID NO: 3180 - protein, 11 aa, Artificial
  IGFBP-2 heparin binding domain-containing peptide sequence
RRKLGLNEPRK

SEQ ID NO: 3181 - protein, 11 aa, Artificial
  IGFBP-2 heparin binding domain-containing peptide sequence
HRKLGLNEPRK

SEQ ID NO: 3182 - protein, 11 aa, Artificial
  IGFBP-2 heparin binding domain-containing peptide sequence
KHRLGLNEPRK

SEQ ID NO: 3183 - protein, 11 aa, Artificial
  IGFBP-2 heparin binding domain-containing peptide sequence
RHRLGLNEPRK

SEQ ID NO: 3184 - protein, 11 aa, Artificial
  IGFBP-2 heparin binding domain-containing peptide sequence
HHRLGLNEPRK

SEQ ID NO: 3185 - protein, 11 aa, Artificial
  IGFBP-2 heparin binding domain-containing peptide sequence
KKRLGLNEPRK

SEQ ID NO: 3186 - protein, 11 aa, Artificial
  IGFBP-2 heparin binding domain-containing peptide sequence
RKRLGLNEPRK

SEQ ID NO: 3187 - protein, 11 aa, Artificial
  IGFBP-2 heparin binding domain-containing peptide sequence
HKRLGLNEPRK

SEQ ID NO: 3188 - protein, 11 aa, Artificial
  IGFBP-2 heparin binding domain-containing peptide sequence
KRRLGLNEPRK

SEQ ID NO: 3189 - protein, 11 aa, Artificial
  IGFBP-2 heparin binding domain-containing peptide sequence
RRRLGLNEPRK

SEQ ID NO: 3190 - protein, 11 aa, Artificial
  IGFBP-2 heparin binding domain-containing peptide sequence
HRRLGLNEPRK

SEQ ID NO: 3191 - protein, 10 aa, Artificial
  IGFBP-2 heparin binding domain-containing peptide sequence
KHHIGLNPRK

SEQ ID NO: 3192 - protein, 11 aa, Artificial
  IGFBP-2 heparin binding domain-containing peptide sequence
RHHIGLNEPRK

SEQ ID NO: 3193 - protein, 11 aa, Artificial
  IGFBP-2 heparin binding domain-containing peptide sequence
HHHIGLNEPRK

SEQ ID NO: 3194 - protein, 11 aa, Artificial
  IGFBP-2 heparin binding domain-containing peptide sequence
KKHIGLNEPRK

SEQ ID NO: 3195 - protein, 11 aa, Artificial
  IGFBP-2 heparin binding domain-containing peptide sequence
RKHIGLNEPRK

SEQ ID NO: 3196 - protein, 11 aa, Artificial
  IGFBP-2 heparin binding domain-containing peptide sequence
HKHIGLNEPRK

SEQ ID NO: 3197 - protein, 11 aa, Artificial
  IGFBP-2 heparin binding domain-containing peptide sequence
KRHIGLNEPRK

SEQ ID NO: 3198 - protein, 11 aa, Artificial
  IGFBP-2 heparin binding domain-containing peptide sequence
RRHIGLNEPRK

SEQ ID NO: 3199 - protein, 11 aa, Artificial
  IGFBP-2 heparin binding domain-containing peptide sequence
HRHIGLNEPRK

SEQ ID NO: 3200 - protein, 11 aa, Artificial
  IGFBP-2 heparin binding domain-containing peptide sequence
KHKIGLNEPRK

SEQ ID NO: 3201 - protein, 11 aa, Artificial
  IGFBP-2 heparin binding domain-containing peptide sequence
RHKIGLNEPRK

SEQ ID NO: 3202 - protein, 11 aa, Artificial
  IGFBP-2 heparin binding domain-containing peptide sequence
HHKIGLNEPRK

SEQ ID NO: 3203 - protein, 11 aa, Artificial
  IGFBP-2 heparin binding domain-containing peptide sequence
KKKIGLNEPRK

SEQ ID NO: 3204 - protein, 11 aa, Artificial
  IGFBP-2 heparin binding domain-containing peptide sequence
RKKIGLNEPRK

SEQ ID NO: 3205 - protein, 11 aa, Artificial
  IGFBP-2 heparin binding domain-containing peptide sequence
HKKIGLNEPRK

SEQ ID NO: 3206 - protein, 11 aa, Artificial
  IGFBP-2 heparin binding domain-containing peptide sequence
KRKIGLNEPRK

SEQ ID NO: 3207 - protein, 11 aa, Artificial
  IGFBP-2 heparin binding domain-containing peptide sequence
RRKIGLNEPRK

SEQ ID NO: 3208 - protein, 11 aa, Artificial
  IGFBP-2 heparin binding domain-containing peptide sequence
HRKIGLNEPRK

SEQ ID NO: 3209 - protein, 11 aa, Artificial
  IGFBP-2 heparin binding domain-containing peptide sequence
KHRIGLNEPRK

SEQ ID NO: 3210 - protein, 11 aa, Artificial
  IGFBP-2 heparin binding domain-containing peptide sequence
RHRIGLNEPRK

SEQ ID NO: 3211 - protein, 11 aa, Artificial
  IGFBP-2 heparin binding domain-containing peptide sequence
HHRIGLNEPRK

SEQ ID NO: 3212 - protein, 11 aa, Artificial
  IGFBP-2 heparin binding domain-containing peptide sequence
KKRIGLNEPRK

SEQ ID NO: 3213 - protein, 11 aa, Artificial
  IGFBP-2 heparin binding domain-containing peptide sequence
RKRIGLNEPRK

SEQ ID NO: 3214 - protein, 11 aa, Artificial
  IGFBP-2 heparin binding domain-containing peptide sequence
HKRIGLNEPRK

SEQ ID NO: 3215 - protein, 11 aa, Artificial
  IGFBP-2 heparin binding domain-containing peptide sequence
KRRIGLNEPRK

SEQ ID NO: 3216 - protein, 11 aa, Artificial
  IGFBP-2 heparin binding domain-containing peptide sequence
RRRIGLNEPRK

SEQ ID NO: 3217 - protein, 11 aa, Artificial
  IGFBP-2 heparin binding domain-containing peptide sequence
HRRIGLNEPRK

SEQ ID NO: 3218 - protein, 11 aa, Artificial
  IGFBP-2 heparin binding domain-containing peptide sequence
KHHVGLNEPRK

SEQ ID NO: 3219 - protein, 11 aa, Artificial
  IGFBP-2 heparin binding domain-containing peptide sequence
RHHVGLNEPRK

SEQ ID NO: 3220 - protein, 11 aa, Artificial
  IGFBP-2 heparin binding domain-containing peptide sequence
HHHVGLNEPRK

SEQ ID NO: 3221 - protein, 11 aa, Artificial
  IGFBP-2 heparin binding domain-containing peptide sequence
KKHVGLNEPRK

SEQ ID NO: 3222 - protein, 11 aa, Artificial
  IGFBP-2 heparin binding domain-containing peptide sequence
RKHVGLNEPRK

SEQ ID NO: 3223 - protein, 11 aa, Artificial
  IGFBP-2 heparin binding domain-containing peptide sequence
HKHVGLNEPRK

SEQ ID NO: 3224 - protein, 11 aa, Artificial
  IGFBP-2 heparin binding domain-containing peptide sequence
KRHVGLNEPRK

SEQ ID NO: 3225 - protein, 11 aa, Artificial
  IGFBP-2 heparin binding domain-containing peptide sequence
RRHVGLNEPRK

SEQ ID NO: 3226 - protein, 11 aa, Artificial
  IGFBP-2 heparin binding domain-containing peptide sequence
HRHVGLNEPRK

SEQ ID NO: 3227 - protein, 11 aa, Artificial
  IGFBP-2 heparin binding domain-containing peptide sequence
KHKVGLNEPRK

SEQ ID NO: 3228 - protein, 11 aa, Artificial
  IGFBP-2 heparin binding domain-containing peptide sequence
RHKVGLNEPRK

SEQ ID NO: 3229 - protein, 11 aa, Artificial
  IGFBP-2 heparin binding domain-containing peptide sequence
HHKVGLNEPRK

SEQ ID NO: 3230 - protein, 11 aa, Artificial
  IGFBP-2 heparin binding domain-containing peptide sequence
KKKVGLNEPRK

SEQ ID NO: 3231 - protein, 11 aa, Artificial
  IGFBP-2 heparin binding domain-containing peptide sequence
RKKVGLNEPRK

SEQ ID NO: 3232 - protein, 11 aa, Artificial
  IGFBP-2 heparin binding domain-containing peptide sequence
HKKVGLNEPRK

SEQ ID NO: 3233 - protein, 11 aa, Artificial
  IGFBP-2 heparin binding domain-containing peptide sequence
KRKVGLNEPRK

SEQ ID NO: 3234 - protein, 11 aa, Artificial
  IGFBP-2 heparin binding domain-containing peptide sequence
RRKVGLNEPRK

SEQ ID NO: 3235 - protein, 11 aa, Artificial
  IGFBP-2 heparin binding domain-containing peptide sequence
HRKVGLNEPRK

SEQ ID NO: 3236 - protein, 11 aa, Artificial
  IGFBP-2 heparin binding domain-containing peptide sequence
KHRVGLNEPRK

SEQ ID NO: 3237 - protein, 11 aa, Artificial
  IGFBP-2 heparin binding domain-containing peptide sequence
RHRVGLNEPRK

SEQ ID NO: 3238 - protein, 11 aa, Artificial
  IGFBP-2 heparin binding domain-containing peptide sequence
HHRVGLNEPRK

SEQ ID NO: 3239 - protein, 11 aa, Artificial
  IGFBP-2 heparin binding domain-containing peptide sequence
KKRVGLNEPRK

SEQ ID NO: 3240 - protein, 11 aa, Artificial
  IGFBP-2 heparin binding domain-containing peptide sequence
RKRVGLNEPRK

SEQ ID NO: 3241 - protein, 11 aa, Artificial
  IGFBP-2 heparin binding domain-containing peptide sequence
HKRVGLNEPRK

SEQ ID NO: 3242 - protein, 11 aa, Artificial
  IGFBP-2 heparin binding domain-containing peptide sequence
KRRVGLNEPRK

SEQ ID NO: 3243 - protein, 11 aa, Artificial
  IGFBP-2 heparin binding domain-containing peptide sequence
RRRVGLNEPRK

SEQ ID NO: 3244 - protein, 11 aa, Artificial
  IGFBP-2 heparin binding domain-containing peptide sequence
HRRVGLNEPRK

SEQ ID NO: 3245 - protein, 11 aa, Artificial
  IGFBP-2 heparin binding domain-containing peptide sequence
KHHLGINEPRK

SEQ ID NO: 3246 - protein, 11 aa, Artificial
  IGFBP-2 heparin binding domain-containing peptide sequence
RHHLGINEPRK

SEQ ID NO: 3247 - protein, 11 aa, Artificial
  IGFBP-2 heparin binding domain-containing peptide sequence
HHHLGINEPRK

SEQ ID NO: 3248 - protein, 11 aa, Artificial
  IGFBP-2 heparin binding domain-containing peptide sequence
KKHLGINEPRK

SEQ ID NO: 3249 - protein, 11 aa, Artificial
  IGFBP-2 heparin binding domain-containing peptide sequence
RKHLGINEPRK

SEQ ID NO: 3250 - protein, 11 aa, Artificial
  IGFBP-2 heparin binding domain-containing peptide sequence
HKHLGINEPRK

SEQ ID NO: 3251 - protein, 11 aa, Artificial
  IGFBP-2 heparin binding domain-containing peptide sequence
KRHLGINEPRK

SEQ ID NO: 3252 - protein, 11 aa, Artificial
  IGFBP-2 heparin binding domain-containing peptide sequence
RRHLGINEPRK

SEQ ID NO: 3253 - protein, 11 aa, Artificial
  IGFBP-2 heparin binding domain-containing peptide sequence
HRHLGINEPRK

SEQ ID NO: 3254 - protein, 11 aa, Artificial
  IGFBP-2 heparin binding domain-containing peptide sequence
KHKLGINEPRK

SEQ ID NO: 3255 - protein, 11 aa, Artificial
  IGFBP-2 heparin binding domain-containing peptide sequence
RHKLGINEPRK

SEQ ID NO: 3256 - protein, 11 aa, Artificial
  IGFBP-2 heparin binding domain-containing peptide sequence
HHKLGINEPRK

SEQ ID NO: 3257 - protein, 11 aa, Artificial
  IGFBP-2 heparin binding domain-containing peptide sequence
KKKLGINEPRK

SEQ ID NO: 3258 - protein, 11 aa, Artificial
  IGFBP-2 heparin binding domain-containing peptide sequence
RKKLGINEPRK

SEQ ID NO: 3259 - protein, 11 aa, Artificial
  IGFBP-2 heparin binding domain-containing peptide sequence
HKKLGINEPRK

SEQ ID NO: 3260 - protein, 11 aa, Artificial
  IGFBP-2 heparin binding domain-containing peptide sequence
KRKLGINEPRK

SEQ ID NO: 3261 - protein, 11 aa, Artificial
  IGFBP-2 heparin binding domain-containing peptide sequence
RRKLGINEPRK

SEQ ID NO: 3262 - protein, 11 aa, Artificial
  IGFBP-2 heparin binding domain-containing peptide sequence
HRKLGINEPRK

SEQ ID NO: 3263 - protein, 11 aa, Artificial
  IGFBP-2 heparin binding domain-containing peptide sequence
KHRLGINEPRK

SEQ ID NO: 3264 - protein, 11 aa, Artificial
  IGFBP-2 heparin binding domain-containing peptide sequence
RHRLGINEPRK

SEQ ID NO: 3265 - protein, 11 aa, Artificial
  IGFBP-2 heparin binding domain-containing peptide sequence
HHRLGINEPRK

SEQ ID NO: 3266 - protein, 11 aa, Artificial
  IGFBP-2 heparin binding domain-containing peptide sequence
KKRLGINEPRK

SEQ ID NO: 3267 - protein, 11 aa, Artificial
  IGFBP-2 heparin binding domain-containing peptide sequence
RKRLGINEPRK

SEQ ID NO: 3268 - protein, 11 aa, Artificial
  IGFBP-2 heparin binding domain-containing peptide sequence
HKRLGINEPRK

SEQ ID NO: 3269 - protein, 11 aa, Artificial
  IGFBP-2 heparin binding domain-containing peptide sequence
KRRLGINEPRK

SEQ ID NO: 3270 - protein, 11 aa, Artificial
  IGFBP-2 heparin binding domain-containing peptide sequence
RRRLGINEPRK

SEQ ID NO: 3271 - protein, 11 aa, Artificial
  IGFBP-2 heparin binding domain-containing peptide sequence
HRRLGINEPRK

SEQ ID NO: 3272 - protein, 11 aa, Artificial
  IGFBP-2 heparin binding domain-containing peptide sequence
KHHIGIENPRK

SEQ ID NO: 3273 - protein, 11 aa, Artificial
  IGFBP-2 heparin binding domain-containing peptide sequence
RHHIGINEPRK

SEQ ID NO: 3274 - protein, 11 aa, Artificial
  IGFBP-2 heparin binding domain-containing peptide sequence
HHHIGINEPRK

SEQ ID NO: 3275 - protein, 11 aa, Artificial
  IGFBP-2 heparin binding domain-containing peptide sequence
KKHIGINEPRK

SEQ ID NO: 3276 - protein, 11 aa, Artificial
  IGFBP-2 heparin binding domain-containing peptide sequence
RKHIGINEPRK

SEQ ID NO: 3277 - protein, 11 aa, Artificial
  IGFBP-2 heparin binding domain-containing peptide sequence
HKHIGINEPRK

SEQ ID NO: 3278 - protein, 11 aa, Artificial
  IGFBP-2 heparin binding domain-containing peptide sequence
KRHIGINEPRK

SEQ ID NO: 3279 - protein, 11 aa, Artificial
  IGFBP-2 heparin binding domain-containing peptide sequence
RRHIGINEPRK

SEQ ID NO: 3280 - protein, 11 aa, Artificial
  IGFBP-2 heparin binding domain-containing peptide sequence
HRHIGINEPRK

SEQ ID NO: 3281 - protein, 11 aa, Artificial
  IGFBP-2 heparin binding domain-containing peptide sequence
KHKIGINEPRK

SEQ ID NO: 3282 - protein, 11 aa, Artificial
  IGFBP-2 heparin binding domain-containing peptide sequence
RHKIGINEPRK

SEQ ID NO: 3283 - protein, 11 aa, Artificial
  IGFBP-2 heparin binding domain-containing peptide sequence
HHKIGINEPRK

SEQ ID NO: 3284 - protein, 11 aa, Artificial
  IGFBP-2 heparin binding domain-containing peptide sequence
KKKIGINEPRK

SEQ ID NO: 3285 - protein, 11 aa, Artificial
  IGFBP-2 heparin binding domain-containing peptide sequence
RKKIGINEPRK

SEQ ID NO: 3286 - protein, 11 aa, Artificial
  IGFBP-2 heparin binding domain-containing peptide sequence
HKKIGINEPRK

SEQ ID NO: 3287 - protein, 11 aa, Artificial
  IGFBP-2 heparin binding domain-containing peptide sequence
KRKIGINEPRK

SEQ ID NO: 3288 - protein, 11 aa, Artificial
  IGFBP-2 heparin binding domain-containing peptide sequence
RRKIGINEPRK

SEQ ID NO: 3289 - protein, 11 aa, Artificial
  IGFBP-2 heparin binding domain-containing peptide sequence
HRKIGINEPRK

SEQ ID NO: 3290 - protein, 11 aa, Artificial
  IGFBP-2 heparin binding domain-containing peptide sequence
KHRIGINEPRK

SEQ ID NO: 3291 - protein, 11 aa, Artificial
  IGFBP-2 heparin binding domain-containing peptide sequence
RHRIGINEPRK

SEQ ID NO: 3292 - protein, 11 aa, Artificial
  IGFBP-2 heparin binding domain-containing peptide sequence
HHRIGINEPRK

SEQ ID NO: 3293 - protein, 11 aa, Artificial
  IGFBP-2 heparin binding domain-containing peptide sequence
KKRIGINEPRK

SEQ ID NO: 3294 - protein, 11 aa, Artificial
  IGFBP-2 heparin binding domain-containing peptide sequence
RKRIGINEPRK

SEQ ID NO: 3295 - protein, 11 aa, Artificial
  IGFBP-2 heparin binding domain-containing peptide sequence
HKRIGINEPRK

SEQ ID NO: 3296 - protein, 11 aa, Artificial
  IGFBP-2 heparin binding domain-containing peptide sequence
KRRIGINEPRK

SEQ ID NO: 3297 - protein, 11 aa, Artificial
  IGFBP-2 heparin binding domain-containing peptide sequence
RRRIGINEPRK

SEQ ID NO: 3298 - protein, 11 aa, Artificial
  IGFBP-2 heparin binding domain-containing peptide sequence
HRRIGINEPRK

SEQ ID NO: 3299 - protein, 11 aa, Artificial
  IGFBP-2 heparin binding domain-containing peptide sequence
KHHVGINEPRK

SEQ ID NO: 3300 - protein, 11 aa, Artificial
  IGFBP-2 heparin binding domain-containing peptide sequence
RHHVGINEPRK

SEQ ID NO: 3301 - protein, 11 aa, Artificial
  IGFBP-2 heparin binding domain-containing peptide sequence
HHHVGINEPRK

SEQ ID NO: 3302 - protein, 11 aa, Artificial
  IGFBP-2 heparin binding domain-containing peptide sequence
KKHVGINEPRK

SEQ ID NO: 3303 - protein, 11 aa, Artificial
  IGFBP-2 heparin binding domain-containing peptide sequence
RKHVGINEPRK

SEQ ID NO: 3304 - protein, 11 aa, Artificial
  IGFBP-2 heparin binding domain-containing peptide sequence
HKHVGINEPRK

SEQ ID NO: 3305 - protein, 11 aa, Artificial
  IGFBP-2 heparin binding domain-containing peptide sequence
KRHVGINEPRK

SEQ ID NO: 3306 - protein, 11 aa, Artificial
  IGFBP-2 heparin binding domain-containing peptide sequence
RRHVGINEPRK

SEQ ID NO: 3307 - protein, 11 aa, Artificial
  IGFBP-2 heparin binding domain-containing peptide sequence
HRHVGINEPRK

SEQ ID NO: 3308 - protein, 11 aa, Artificial
  IGFBP-2 heparin binding domain-containing peptide sequence
KHKVGINEPRK

SEQ ID NO: 3309 - protein, 11 aa, Artificial
  IGFBP-2 heparin binding domain-containing peptide sequence
RHKVGINEPRK

SEQ ID NO: 3310 - protein, 11 aa, Artificial
  IGFBP-2 heparin binding domain-containing peptide sequence
HHKVGINEPRK

SEQ ID NO: 3311 - protein, 11 aa, Artificial
  IGFBP-2 heparin binding domain-containing peptide sequence
KKKVGINEPRK

SEQ ID NO: 3312 - protein, 11 aa, Artificial
  IGFBP-2 heparin binding domain-containing peptide sequence
RKKVGINEPRK

SEQ ID NO: 3313 - protein, 11 aa, Artificial
  IGFBP-2 heparin binding domain-containing peptide sequence
HKKVGINEPRK

SEQ ID NO: 3314 - protein, 11 aa, Artificial
  IGFBP-2 heparin binding domain-containing peptide sequence
KRKVGINEPRK

SEQ ID NO: 3315 - protein, 11 aa, Artificial
  IGFBP-2 heparin binding domain-containing peptide sequence
RRKVGINEPRK

SEQ ID NO: 3316 - protein, 11 aa, Artificial
  IGFBP-2 heparin binding domain-containing peptide sequence
HRKVGINEPRK

SEQ ID NO: 3317 - protein, 11 aa, Artificial
  IGFBP-2 heparin binding domain-containing peptide sequence
KHRVGINEPRK

SEQ ID NO: 3318 - protein, 11 aa, Artificial
  IGFBP-2 heparin binding domain-containing peptide sequence
RHRVGINEPRK

SEQ ID NO: 3319 - protein, 11 aa, Artificial
  IGFBP-2 heparin binding domain-containing peptide sequence
HHRVGINEPRK

SEQ ID NO: 3320 - protein, 11 aa, Artificial
  IGFBP-2 heparin binding domain-containing peptide sequence
KKRVGINEPRK

SEQ ID NO: 3321 - protein, 11 aa, Artificial
  IGFBP-2 heparin binding domain-containing peptide sequence
RKRVGINEPRK

SEQ ID NO: 3322 - protein, 11 aa, Artificial
  IGFBP-2 heparin binding domain-containing peptide sequence
HKRVGINEPRK

SEQ ID NO: 3323 - protein, 11 aa, Artificial
  IGFBP-2 heparin binding domain-containing peptide sequence
KRRVGINEPRK

SEQ ID NO: 3324 - protein, 11 aa, Artificial
  IGFBP-2 heparin binding domain-containing peptide sequence
RRRVGINEPRK

SEQ ID NO: 3325 - protein, 11 aa, Artificial
  IGFBP-2 heparin binding domain-containing peptide sequence
HRRVGINEPRK

SEQ ID NO: 3326 - protein, 11 aa, Artificial
  IGFBP-2 heparin binding domain-containing peptide sequence
KHHLGVNEPRK

SEQ ID NO: 3327 - protein, 11 aa, Artificial
  IGFBP-2 heparin binding domain-containing peptide sequence
RHHLGVNEPRK

SEQ ID NO: 3328 - protein, 11 aa, Artificial
  IGFBP-2 heparin binding domain-containing peptide sequence
HHHLGVNEPRK

SEQ ID NO: 3329 - protein, 11 aa, Artificial
  IGFBP-2 heparin binding domain-containing peptide sequence
KKHLGVNEPRK

SEQ ID NO: 3330 - protein, 11 aa, Artificial
  IGFBP-2 heparin binding domain-containing peptide sequence
RKHLGVNEPRK

SEQ ID NO: 3331 - protein, 11 aa, Artificial
  IGFBP-2 heparin binding domain-containing peptide sequence
HKHLGVNEPRK

SEQ ID NO: 3332 - protein, 11 aa, Artificial
  IGFBP-2 heparin binding domain-containing peptide sequence
KRHLGVNEPRK

SEQ ID NO: 3333 - protein, 11 aa, Artificial
  IGFBP-2 heparin binding domain-containing peptide sequence
RRHLGVNEPRK

SEQ ID NO: 3334 - protein, 11 aa, Artificial
  IGFBP-2 heparin binding domain-containing peptide sequence
HRHLGVNEPRK

SEQ ID NO: 3335 - protein, 11 aa, Artificial
  IGFBP-2 heparin binding domain-containing peptide sequence
KHKLGVNEPRK

SEQ ID NO: 3336 - protein, 11 aa, Artificial
  IGFBP-2 heparin binding domain-containing peptide sequence
RHKLGVNEPRK

SEQ ID NO: 3337 - protein, 11 aa, Artificial
  IGFBP-2 heparin binding domain-containing peptide sequence
HHKLGVNEPRK

SEQ ID NO: 3338 - protein, 11 aa, Artificial
  IGFBP-2 heparin binding domain-containing peptide sequence
KKKLGVNEPRK

SEQ ID NO: 3339 - protein, 11 aa, Artificial
  IGFBP-2 heparin binding domain-containing peptide sequence
RKKLGVNEPRK

SEQ ID NO: 3340 - protein, 11 aa, Artificial
  IGFBP-2 heparin binding domain-containing peptide sequence
HKKLGVNEPRK

SEQ ID NO: 3341 - protein, 11 aa, Artificial
  IGFBP-2 heparin binding domain-containing peptide sequence
KRKLGVNEPRK

SEQ ID NO: 3342 - protein, 11 aa, Artificial
  IGFBP-2 heparin binding domain-containing peptide sequence
RRKLGVNEPRK

SEQ ID NO: 3343 - protein, 11 aa, Artificial
  IGFBP-2 heparin binding domain-containing peptide sequence
HRKLGVNEPRK

SEQ ID NO: 3344 - protein, 11 aa, Artificial
  IGFBP-2 heparin binding domain-containing peptide sequence
KHRLGVNEPRK

SEQ ID NO: 3345 - protein, 11 aa, Artificial
  IGFBP-2 heparin binding domain-containing peptide sequence
RHRLGVNEPRK

SEQ ID NO: 3346 - protein, 11 aa, Artificial
  IGFBP-2 heparin binding domain-containing peptide sequence
HHRLGVNEPRK

SEQ ID NO: 3347 - protein, 11 aa, Artificial
  IGFBP-2 heparin binding domain-containing peptide sequence
KKRLGVNEPRK

SEQ ID NO: 3348 - protein, 11 aa, Artificial
  IGFBP-2 heparin binding domain-containing peptide sequence
RKRLGVNEPRK

SEQ ID NO: 3349 - protein, 11 aa, Artificial
  IGFBP-2 heparin binding domain-containing peptide sequence
HKRLGVNEPRK

SEQ ID NO: 3350 - protein, 11 aa, Artificial
  IGFBP-2 heparin binding domain-containing peptide sequence
KRRLGVNEPRK

SEQ ID NO: 3351 - protein, 11 aa, Artificial
  IGFBP-2 heparin binding domain-containing peptide sequence
RRRLGVNEPRK

SEQ ID NO: 3352 - protein, 11 aa, Artificial
  IGFBP-2 heparin binding domain-containing peptide sequence
HRRLGVNEPRK

SEQ ID NO: 3353 - protein, 11 aa, Artificial
  IGFBP-2 heparin binding domain-containing peptide sequence
KHHIGVNEPRK

SEQ ID NO: 3354 - protein, 11 aa, Artificial
  IGFBP-2 heparin binding domain-containing peptide sequence
RHHIGVNEPRK

SEQ ID NO: 3355 - protein, 11 aa, Artificial
  IGFBP-2 heparin binding domain-containing peptide sequence
HHHIGVNEPRK

SEQ ID NO: 3356 - protein, 11 aa, Artificial
  IGFBP-2 heparin binding domain-containing peptide sequence
KKHIGVNEPRK

SEQ ID NO: 3357 - protein, 11 aa, Artificial
  IGFBP-2 heparin binding domain-containing peptide sequence
RKHIGVNEPRK

SEQ ID NO: 3358 - protein, 11 aa, Artificial
  IGFBP-2 heparin binding domain-containing peptide sequence
HKHIGVNEPRK

SEQ ID NO: 3359 - protein, 11 aa, Artificial
  IGFBP-2 heparin binding domain-containing peptide sequence
KRHIGVNEPRK

SEQ ID NO: 3360 - protein, 11 aa, Artificial
  IGFBP-2 heparin binding domain-containing peptide sequence
RRHIGVNEPRK

SEQ ID NO: 3361 - protein, 11 aa, Artificial
  IGFBP-2 heparin binding domain-containing peptide sequence
HRHIGVNEPRK

SEQ ID NO: 3362 - protein, 11 aa, Artificial
  IGFBP-2 heparin binding domain-containing peptide sequence
KHKIGVNEPRK

SEQ ID NO: 3363 - protein, 11 aa, Artificial
  IGFBP-2 heparin binding domain-containing peptide sequence
RHKIGVNEPRK

SEQ ID NO: 3364 - protein, 11 aa, Artificial
  IGFBP-2 heparin binding domain-containing peptide sequence
HHKIGVNEPRK

SEQ ID NO: 3365 - protein, 11 aa, Artificial
  IGFBP-2 heparin binding domain-containing peptide sequence
KKKIGVNEPRK

SEQ ID NO: 3366 - protein, 11 aa, Artificial
  IGFBP-2 heparin binding domain-containing peptide sequence
RKKIGVNEPRK

SEQ ID NO: 3367 - protein, 11 aa, Artificial
  IGFBP-2 heparin binding domain-containing peptide sequence
HKKIGVNEPRK

SEQ ID NO: 3368 - protein, 11 aa, Artificial
  IGFBP-2 heparin binding domain-containing peptide sequence
KRKIGVNEPRK

SEQ ID NO: 3369 - protein, 11 aa, Artificial
  IGFBP-2 heparin binding domain-containing peptide sequence
RRKIGVNEPRK

SEQ ID NO: 3370 - protein, 11 aa, Artificial
  IGFBP-2 heparin binding domain-containing peptide sequence
HRKIGVNEPRK

SEQ ID NO: 3371 - protein, 11 aa, Artificial
  IGFBP-2 heparin binding domain-containing peptide sequence
KHRIGVNEPRK

SEQ ID NO: 3372 - protein, 11 aa, Artificial
  IGFBP-2 heparin binding domain-containing peptide sequence
RHRIGVNEPRK

SEQ ID NO: 3373 - protein, 11 aa, Artificial
  IGFBP-2 heparin binding domain-containing peptide sequence
HHRIGVNEPRK

SEQ ID NO: 3374 - protein, 11 aa, Artificial
  IGFBP-2 heparin binding domain-containing peptide sequence
KKRIGVNEPRK

SEQ ID NO: 3375 - protein, 11 aa, Artificial
  IGFBP-2 heparin binding domain-containing peptide sequence
RKRIGVNEPRK

SEQ ID NO: 3376 - protein, 11 aa, Artificial
  IGFBP-2 heparin binding domain-containing peptide sequence
HKRIGVNEPRK

SEQ ID NO: 3377 - protein, 11 aa, Artificial
  IGFBP-2 heparin binding domain-containing peptide sequence
KRRIGVNEPRK

SEQ ID NO: 3378 - protein, 11 aa, Artificial
  IGFBP-2 heparin binding domain-containing peptide sequence
RRRIGVNEPRK

SEQ ID NO: 3379 - protein, 11 aa, Artificial
  IGFBP-2 heparin binding domain-containing peptide sequence
HRRIGVNEPRK

SEQ ID NO: 3380 - protein, 11 aa, Artificial
  IGFBP-2 heparin binding domain-containing peptide sequence
KHHVGVNEPRK

SEQ ID NO: 3381 - protein, 11 aa, Artificial
  IGFBP-2 heparin binding domain-containing peptide sequence
RHHVGVNEPRK

SEQ ID NO: 3382 - protein, 11 aa, Artificial
  IGFBP-2 heparin binding domain-containing peptide sequence
HHHVGVNEPRK

SEQ ID NO: 3383 - protein, 11 aa, Artificial
  IGFBP-2 heparin binding domain-containing peptide sequence
KKHVGVNEPRK

SEQ ID NO: 3384 - protein, 11 aa, Artificial
  IGFBP-2 heparin binding domain-containing peptide sequence
RKHVGVNEPRK

SEQ ID NO: 3385 - protein, 11 aa, Artificial
  IGFBP-2 heparin binding domain-containing peptide sequence
HKHVGVNEPRK

SEQ ID NO: 3386 - protein, 11 aa, Artificial
  IGFBP-2 heparin binding domain-containing peptide sequence
KRHVGVNEPRK

SEQ ID NO: 3387 - protein, 11 aa, Artificial
  IGFBP-2 heparin binding domain-containing peptide sequence
RRHVGVNEPRK

SEQ ID NO: 3388 - protein, 11 aa, Artificial
  IGFBP-2 heparin binding domain-containing peptide sequence
HRHVGVNEPRK

SEQ ID NO: 3389 - protein, 11 aa, Artificial
  IGFBP-2 heparin binding domain-containing peptide sequence
KHKVGVNEPRK

SEQ ID NO: 3390 - protein, 11 aa, Artificial
  IGFBP-2 heparin binding domain-containing peptide sequence
RHKVGVNEPRK

SEQ ID NO: 3391 - protein, 11 aa, Artificial
  IGFBP-2 heparin binding domain-containing peptide sequence
HHKVGVNEPRK

SEQ ID NO: 3392 - protein, 11 aa, Artificial
  IGFBP-2 heparin binding domain-containing peptide sequence
KKKVGVNEPRK

SEQ ID NO: 3393 - protein, 11 aa, Artificial
  IGFBP-2 heparin binding domain-containing peptide sequence
RKKVGVNEPRK

SEQ ID NO: 3394 - protein, 11 aa, Artificial
  IGFBP-2 heparin binding domain-containing peptide sequence
HKKVGVNEPRK

SEQ ID NO: 3395 - protein, 11 aa, Artificial
  IGFBP-2 heparin binding domain-containing peptide sequence
KRKVGVNEPRK

SEQ ID NO: 3396 - protein, 11 aa, Artificial
  IGFBP-2 heparin binding domain-containing peptide sequence
RRKVGVNEPRK

SEQ ID NO: 3397 - protein, 11 aa, Artificial
  IGFBP-2 heparin binding domain-containing peptide sequence
HRKVGVNEPRK

SEQ ID NO: 3398 - protein, 11 aa, Artificial
  IGFBP-2 heparin binding domain-containing peptide sequence
KHRVGVNEPRK

SEQ ID NO: 3399 - protein, 11 aa, Artificial
  IGFBP-2 heparin binding domain-containing peptide sequence
RHRVGVNEPRK

SEQ ID NO: 3400 - protein, 11 aa, Artificial
  IGFBP-2 heparin binding domain-containing peptide sequence
HHRVGVNEPRK

SEQ ID NO: 3401 - protein, 11 aa, Artificial
  IGFBP-2 heparin binding domain-containing peptide sequence
KKRVGVNEPRK

SEQ ID NO: 3402 - protein, 11 aa, Artificial
  IGFBP-2 heparin binding domain-containing peptide sequence
RKRVGVNEPRK

SEQ ID NO: 3403 - protein, 11 aa, Artificial
  IGFBP-2 heparin binding domain-containing peptide sequence
HKRVGVNEPRK

SEQ ID NO: 3404 - protein, 11 aa, Artificial
  IGFBP-2 heparin binding domain-containing peptide sequence
KRRVGVNEPRK

SEQ ID NO: 3405 - protein, 11 aa, Artificial
  IGFBP-2 heparin binding domain-containing peptide sequence
RRRVGVNEPRK

SEQ ID NO: 3406 - protein, 11 aa, Artificial
  IGFBP-2 heparin binding domain-containing peptide sequence
HRRVGVNEPRK

SEQ ID NO: 3407 - protein, 11 aa, Artificial
  IGFBP-2 heparin binding domain-containing peptide sequence
KHHLGLENPRK

SEQ ID NO: 3408 - protein, 11 aa, Artificial
  IGFBP-2 heparin binding domain-containing peptide sequence
RHHLGLENPRK

SEQ ID NO: 3409 - protein, 11 aa, Artificial
  IGFBP-2 heparin binding domain-containing peptide sequence
HHHLGLENPRK

SEQ ID NO: 3410 - protein, 11 aa, Artificial
  IGFBP-2 heparin binding domain-containing peptide sequence
KKHLGLENPRK

SEQ ID NO: 3411 - protein, 11 aa, Artificial
  IGFBP-2 heparin binding domain-containing peptide sequence
RKHLGLENPRK

SEQ ID NO: 3412 - protein, 11 aa, Artificial
  IGFBP-2 heparin binding domain-containing peptide sequence
HKHLGLENPRK

SEQ ID NO: 3413 - protein, 11 aa, Artificial
  IGFBP-2 heparin binding domain-containing peptide sequence
KRHLGLENPRK

SEQ ID NO: 3414 - protein, 11 aa, Artificial
  IGFBP-2 heparin binding domain-containing peptide sequence
RRHLGLENPRK

SEQ ID NO: 3415 - protein, 11 aa, Artificial
  IGFBP-2 heparin binding domain-containing peptide sequence
HRHLGLENPRK

SEQ ID NO: 3416 - protein, 11 aa, Artificial
  IGFBP-2 heparin binding domain-containing peptide sequence
KHKLGLENPRK

SEQ ID NO: 3417 - protein, 11 aa, Artificial
  IGFBP-2 heparin binding domain-containing peptide sequence
RHKLGLENPRK

SEQ ID NO: 3418 - protein, 11 aa, Artificial
  IGFBP-2 heparin binding domain-containing peptide sequence
HHKLGLENPRK

SEQ ID NO: 3419 - protein, 11 aa, Artificial
  IGFBP-2 heparin binding domain-containing peptide sequence
KKKLGLENPRK

SEQ ID NO: 3420 - protein, 11 aa, Artificial
  IGFBP-2 heparin binding domain-containing peptide sequence
RKKLGLENPRK

SEQ ID NO: 3421 - protein, 11 aa, Artificial
  IGFBP-2 heparin binding domain-containing peptide sequence
HKKLGLENPRK

SEQ ID NO: 3422 - protein, 11 aa, Artificial
  IGFBP-2 heparin binding domain-containing peptide sequence
KRKLGLENPRK

SEQ ID NO: 3423 - protein, 11 aa, Artificial
  IGFBP-2 heparin binding domain-containing peptide sequence
RRKLGLENPRK

SEQ ID NO: 3424 - protein, 11 aa, Artificial
  IGFBP-2 heparin binding domain-containing peptide sequence
HRKLGLENPRK

SEQ ID NO: 3425 - protein, 11 aa, Artificial
  IGFBP-2 heparin binding domain-containing peptide sequence
KHRLGLENPRK

SEQ ID NO: 3426 - protein, 11 aa, Artificial
  IGFBP-2 heparin binding domain-containing peptide sequence
RHRLGLENPRK

SEQ ID NO: 3427 - protein, 11 aa, Artificial
  IGFBP-2 heparin binding domain-containing peptide sequence
HHRLGLENPRK

SEQ ID NO: 3428 - protein, 11 aa, Artificial
  IGFBP-2 heparin binding domain-containing peptide sequence
KKRLGLENPRK

SEQ ID NO: 3429 - protein, 11 aa, Artificial
  IGFBP-2 heparin binding domain-containing peptide sequence
RKRLGLENPRK

SEQ ID NO: 3430 - protein, 11 aa, Artificial
  IGFBP-2 heparin binding domain-containing peptide sequence
HKRLGLENPRK

SEQ ID NO: 3431 - protein, 11 aa, Artificial
  IGFBP-2 heparin binding domain-containing peptide sequence
KRRLGLENPRK

SEQ ID NO: 3432 - protein, 11 aa, Artificial
  IGFBP-2 heparin binding domain-containing peptide sequence
RRRLGLENPRK

SEQ ID NO: 3433 - protein, 11 aa, Artificial
  IGFBP-2 heparin binding domain-containing peptide sequence
HRRLGLENPRK

SEQ ID NO: 3434 - protein, 11 aa, Artificial
  IGFBP-2 heparin binding domain-containing peptide sequence
KHHIGLENPRK

SEQ ID NO: 3435 - protein, 11 aa, Artificial
  IGFBP-2 heparin binding domain-containing peptide sequence
RHHIGLENPRK

SEQ ID NO: 3436 - protein, 11 aa, Artificial
  IGFBP-2 heparin binding domain-containing peptide sequence
HHHIGLENPRK

SEQ ID NO: 3437 - protein, 11 aa, Artificial
  IGFBP-2 heparin binding domain-containing peptide sequence
KKHIGLENPRK

SEQ ID NO: 3438 - protein, 11 aa, Artificial
  IGFBP-2 heparin binding domain-containing peptide sequence
RKHIGLENPRK

SEQ ID NO: 3439 - protein, 11 aa, Artificial
  IGFBP-2 heparin binding domain-containing peptide sequence
HKHIGLENPRK

SEQ ID NO: 3440 - protein, 11 aa, Artificial
  IGFBP-2 heparin binding domain-containing peptide sequence
KRHIGLENPRK

SEQ ID NO: 3441 - protein, 11 aa, Artificial
  IGFBP-2 heparin binding domain-containing peptide sequence
RRHIGLENPRK

SEQ ID NO: 3442 - protein, 11 aa, Artificial
  IGFBP-2 heparin binding domain-containing peptide sequence
HRHIGLENPRK

SEQ ID NO: 3443 - protein, 11 aa, Artificial
  IGFBP-2 heparin binding domain-containing peptide sequence
KHKIGLENPRK

SEQ ID NO: 3444 - protein, 11 aa, Artificial
  IGFBP-2 heparin binding domain-containing peptide sequence
RHKIGLENPRK

SEQ ID NO: 3445 - protein, 11 aa, Artificial
  IGFBP-2 heparin binding domain-containing peptide sequence
HHKIGLENPRK

SEQ ID NO: 3446 - protein, 11 aa, Artificial
  IGFBP-2 heparin binding domain-containing peptide sequence
KKKIGLENPRK

SEQ ID NO: 3447 - protein, 11 aa, Artificial
  IGFBP-2 heparin binding domain-containing peptide sequence
RKKIGLENPRK

SEQ ID NO: 3448 - protein, 11 aa, Artificial
  IGFBP-2 heparin binding domain-containing peptide sequence
HKKIGLENPRK

SEQ ID NO: 3449 - protein, 11 aa, Artificial
  IGFBP-2 heparin binding domain-containing peptide sequence
KRKIGLENPRK

SEQ ID NO: 3450 - protein, 11 aa, Artificial
  IGFBP-2 heparin binding domain-containing peptide sequence
RRKIGLENPRK

SEQ ID NO: 3451 - protein, 11 aa, Artificial
  IGFBP-2 heparin binding domain-containing peptide sequence
HRKIGLENPRK

SEQ ID NO: 3452 - protein, 11 aa, Artificial
  IGFBP-2 heparin binding domain-containing peptide sequence
KHRIGLENPRK

SEQ ID NO: 3453 - protein, 11 aa, Artificial
  IGFBP-2 heparin binding domain-containing peptide sequence
RHRIGLENPRK

SEQ ID NO: 3454 - protein, 11 aa, Artificial
  IGFBP-2 heparin binding domain-containing peptide sequence
HHRIGLENPRK

SEQ ID NO: 3455 - protein, 11 aa, Artificial
  IGFBP-2 heparin binding domain-containing peptide sequence
KKRIGLENPRK

SEQ ID NO: 3456 - protein, 11 aa, Artificial
  IGFBP-2 heparin binding domain-containing peptide sequence
RKRIGLENPRK

SEQ ID NO: 3457 - protein, 11 aa, Artificial
  IGFBP-2 heparin binding domain-containing peptide sequence
HKRIGLENPRK

SEQ ID NO: 3458 - protein, 11 aa, Artificial
  IGFBP-2 heparin binding domain-containing peptide sequence
KRRIGLENPRK

SEQ ID NO: 3459 - protein, 11 aa, Artificial
  IGFBP-2 heparin binding domain-containing peptide sequence
RRRIGLENPRK

SEQ ID NO: 3460 - protein, 11 aa, Artificial
  IGFBP-2 heparin binding domain-containing peptide sequence
HRRIGLENPRK

SEQ ID NO: 3461 - protein, 11 aa, Artificial
  IGFBP-2 heparin binding domain-containing peptide sequence
KHHVGLENPRK

SEQ ID NO: 3462 - protein, 11 aa, Artificial
  IGFBP-2 heparin binding domain-containing peptide sequence
RHHVGLENPRK

SEQ ID NO: 3463 - protein, 11 aa, Artificial
  IGFBP-2 heparin binding domain-containing peptide sequence
HHHVGLENPRK

SEQ ID NO: 3464 - protein, 11 aa, Artificial
  IGFBP-2 heparin binding domain-containing peptide sequence
KKHVGLENPRK

SEQ ID NO: 3465 - protein, 11 aa, Artificial
  IGFBP-2 heparin binding domain-containing peptide sequence
RKHVGLENPRK

SEQ ID NO: 3466 - protein, 11 aa, Artificial
  IGFBP-2 heparin binding domain-containing peptide sequence
HKHVGLENPRK

SEQ ID NO: 3467 - protein, 11 aa, Artificial
  IGFBP-2 heparin binding domain-containing peptide sequence
KRHVGLENPRK

SEQ ID NO: 3468 - protein, 11 aa, Artificial
  IGFBP-2 heparin binding domain-containing peptide sequence
RRHVGLENPRK

SEQ ID NO: 3469 - protein, 11 aa, Artificial
  IGFBP-2 heparin binding domain-containing peptide sequence
HRHVGLENPRK

SEQ ID NO: 3470 - protein, 11 aa, Artificial
  IGFBP-2 heparin binding domain-containing peptide sequence
KHKVGLENPRK

SEQ ID NO: 3471 - protein, 11 aa, Artificial
  IGFBP-2 heparin binding domain-containing peptide sequence
RHKVGLENPRK

SEQ ID NO: 3472 - protein, 11 aa, Artificial
  IGFBP-2 heparin binding domain-containing peptide sequence
HHKVGLENPRK

SEQ ID NO: 3473 - protein, 11 aa, Artificial
  IGFBP-2 heparin binding domain-containing peptide sequence
KKKVGLENPRK

SEQ ID NO: 3474 - protein, 11 aa, Artificial
  IGFBP-2 heparin binding domain-containing peptide sequence
RKKVGLENPRK

SEQ ID NO: 3475 - protein, 11 aa, Artificial
  IGFBP-2 heparin binding domain-containing peptide sequence
HKKVGLENPRK

SEQ ID NO: 3476 - protein, 11 aa, Artificial
  IGFBP-2 heparin binding domain-containing peptide sequence
KRKVGLENPRK

SEQ ID NO: 3477 - protein, 11 aa, Artificial
  IGFBP-2 heparin binding domain-containing peptide sequence
RRKVGLENPRK

SEQ ID NO: 3478 - protein, 11 aa, Artificial
  IGFBP-2 heparin binding domain-containing peptide sequence
HRKVGLENPRK

SEQ ID NO: 3479 - protein, 11 aa, Artificial
  IGFBP-2 heparin binding domain-containing peptide sequence
KHRVGLENPRK

SEQ ID NO: 3480 - protein, 11 aa, Artificial
  IGFBP-2 heparin binding domain-containing peptide sequence
RHRVGLENPRK

SEQ ID NO: 3481 - protein, 11 aa, Artificial
  IGFBP-2 heparin binding domain-containing peptide sequence
HHRVGLENPRK

SEQ ID NO: 3482 - protein, 11 aa, Artificial
  IGFBP-2 heparin binding domain-containing peptide sequence
KKRVGLENPRK

SEQ ID NO: 3483 - protein, 11 aa, Artificial
  IGFBP-2 heparin binding domain-containing peptide sequence
RKRVGLENPRK

SEQ ID NO: 3484 - protein, 11 aa, Artificial
  IGFBP-2 heparin binding domain-containing peptide sequence
HKRVGLENPRK

SEQ ID NO: 3485 - protein, 11 aa, Artificial
  IGFBP-2 heparin binding domain-containing peptide sequence
KRRVGLENPRK

SEQ ID NO: 3486 - protein, 11 aa, Artificial
  IGFBP-2 heparin binding domain-containing peptide sequence
RRRVGLENPRK

SEQ ID NO: 3487 - protein, 11 aa, Artificial
  IGFBP-2 heparin binding domain-containing peptide sequence
HRRVGLENPRK

SEQ ID NO: 3488 - protein, 11 aa, Artificial
  IGFBP-2 heparin binding domain-containing peptide sequence
KHHLGIENPRK

SEQ ID NO: 3489 - protein, 11 aa, Artificial
  IGFBP-2 heparin binding domain-containing peptide sequence
RHHLGIENPRK

SEQ ID NO: 3490 - protein, 11 aa, Artificial
  IGFBP-2 heparin binding domain-containing peptide sequence
HHHLGIENPRK

SEQ ID NO: 3491 - protein, 11 aa, Artificial
  IGFBP-2 heparin binding domain-containing peptide sequence
KKHLGIENPRK

SEQ ID NO: 3492 - protein, 11 aa, Artificial
  IGFBP-2 heparin binding domain-containing peptide sequence
RKHLGIENPRK

SEQ ID NO: 3493 - protein, 11 aa, Artificial
  IGFBP-2 heparin binding domain-containing peptide sequence
HKHLGIENPRK

SEQ ID NO: 3494 - protein, 11 aa, Artificial
  IGFBP-2 heparin binding domain-containing peptide sequence
KRHLGIENPRK

SEQ ID NO: 3495 - protein, 11 aa, Artificial
  IGFBP-2 heparin binding domain-containing peptide sequence
RRHLGIENPRK

SEQ ID NO: 3496 - protein, 11 aa, Artificial
  IGFBP-2 heparin binding domain-containing peptide sequence
HRHLGIENPRK

SEQ ID NO: 3497 - protein, 11 aa, Artificial
  IGFBP-2 heparin binding domain-containing peptide sequence
KHKLGIENPRK

SEQ ID NO: 3498 - protein, 11 aa, Artificial
  IGFBP-2 heparin binding domain-containing peptide sequence
RHKLGIENPRK

SEQ ID NO: 3499 - protein, 11 aa, Artificial
  IGFBP-2 heparin binding domain-containing peptide sequence
HHKLGIENPRK

SEQ ID NO: 3500 - protein, 11 aa, Artificial
  IGFBP-2 heparin binding domain-containing peptide sequence
KKKLGIENPRK

SEQ ID NO: 3501 - protein, 11 aa, Artificial
  IGFBP-2 heparin binding domain-containing peptide sequence
RKKLGIENPRK

SEQ ID NO: 3502 - protein, 11 aa, Artificial
  IGFBP-2 heparin binding domain-containing peptide sequence
HKKLGIENPRK

SEQ ID NO: 3503 - protein, 11 aa, Artificial
  IGFBP-2 heparin binding domain-containing peptide sequence
KRKLGIENPRK

SEQ ID NO: 3504 - protein, 11 aa, Artificial
  IGFBP-2 heparin binding domain-containing peptide sequence
RRKLGIENPRK

SEQ ID NO: 3505 - protein, 11 aa, Artificial
  IGFBP-2 heparin binding domain-containing peptide sequence
HRKLGIENPRK

SEQ ID NO: 3506 - protein, 11 aa, Artificial
  IGFBP-2 heparin binding domain-containing peptide sequence
KHRLGIENPRK

SEQ ID NO: 3507 - protein, 11 aa, Artificial
  IGFBP-2 heparin binding domain-containing peptide sequence
RHRLGIENPRK

SEQ ID NO: 3508 - protein, 11 aa, Artificial
  IGFBP-2 heparin binding domain-containing peptide sequence
HHRLGIENPRK

SEQ ID NO: 3509 - protein, 11 aa, Artificial
  IGFBP-2 heparin binding domain-containing peptide sequence
KKRLGIENPRK

SEQ ID NO: 3510 - protein, 11 aa, Artificial
  IGFBP-2 heparin binding domain-containing peptide sequence
RKRLGIENPRK

SEQ ID NO: 3511 - protein, 11 aa, Artificial
  IGFBP-2 heparin binding domain-containing peptide sequence
HKRLGIENPRK

SEQ ID NO: 3512 - protein, 11 aa, Artificial
  IGFBP-2 heparin binding domain-containing peptide sequence
KRRLGIENPRK

SEQ ID NO: 3513 - protein, 11 aa, Artificial
  IGFBP-2 heparin binding domain-containing peptide sequence
RRRLGIENPRK

SEQ ID NO: 3514 - protein, 11 aa, Artificial
  IGFBP-2 heparin binding domain-containing peptide sequence
HRRLGIENPRK

SEQ ID NO: 3515 - protein, 11 aa, Artificial
  IGFBP-2 heparin binding domain-containing peptide sequence
KHHIGIENPRK

SEQ ID NO: 3516 - protein, 11 aa, Artificial
  IGFBP-2 heparin binding domain-containing peptide sequence
RHHIGIENPRK

SEQ ID NO: 3517 - protein, 11 aa, Artificial
  IGFBP-2 heparin binding domain-containing peptide sequence
HHHIGIENPRK

SEQ ID NO: 3518 - protein, 11 aa, Artificial
  IGFBP-2 heparin binding domain-containing peptide sequence
KKHIGIENPRK

SEQ ID NO: 3519 - protein, 11 aa, Artificial
  IGFBP-2 heparin binding domain-containing peptide sequence
RKHIGIENPRK

SEQ ID NO: 3520 - protein, 11 aa, Artificial
  IGFBP-2 heparin binding domain-containing peptide sequence
HKHIGIENPRK

SEQ ID NO: 3521 - protein, 11 aa, Artificial
  IGFBP-2 heparin binding domain-containing peptide sequence
KRHIGIENPRK

SEQ ID NO: 3522 - protein, 11 aa, Artificial
  IGFBP-2 heparin binding domain-containing peptide sequence
RRHIGIENPRK

SEQ ID NO: 3523 - protein, 11 aa, Artificial
  IGFBP-2 heparin binding domain-containing peptide sequence
HRHIGIENPRK

SEQ ID NO: 3524 - protein, 11 aa, Artificial
  IGFBP-2 heparin binding domain-containing peptide sequence
KHKIGIENPRK

SEQ ID NO: 3525 - protein, 11 aa, Artificial
  IGFBP-2 heparin binding domain-containing peptide sequence
RHKIGIENPRK

SEQ ID NO: 3526 - protein, 11 aa, Artificial
  IGFBP-2 heparin binding domain-containing peptide sequence
HHKIGIENPRK

SEQ ID NO: 3527 - protein, 11 aa, Artificial
  IGFBP-2 heparin binding domain-containing peptide sequence
KKKIGIENPRK

SEQ ID NO: 3528 - protein, 11 aa, Artificial
  IGFBP-2 heparin binding domain-containing peptide sequence
RKKIGIENPRK

SEQ ID NO: 3529 - protein, 11 aa, Artificial
  IGFBP-2 heparin binding domain-containing peptide sequence
HKKIGIENPRK

SEQ ID NO: 3530 - protein, 11 aa, Artificial
  IGFBP-2 heparin binding domain-containing peptide sequence
KRKIGIENPRK

SEQ ID NO: 3531 - protein, 11 aa, Artificial
  IGFBP-2 heparin binding domain-containing peptide sequence
RRKIGIENPRK

SEQ ID NO: 3532 - protein, 11 aa, Artificial
  IGFBP-2 heparin binding domain-containing peptide sequence
HRKIGIENPRK

SEQ ID NO: 3533 - protein, 11 aa, Artificial
  IGFBP-2 heparin binding domain-containing peptide sequence
KHRIGIENPRK

SEQ ID NO: 3534 - protein, 11 aa, Artificial
  IGFBP-2 heparin binding domain-containing peptide sequence
RHRIGIENPRK

SEQ ID NO: 3535 - protein, 11 aa, Artificial
  IGFBP-2 heparin binding domain-containing peptide sequence
HHRIGIENPRK

SEQ ID NO: 3536 - protein, 11 aa, Artificial
  IGFBP-2 heparin binding domain-containing peptide sequence
KKRIGIENPRK

SEQ ID NO: 3537 - protein, 11 aa, Artificial
  IGFBP-2 heparin binding domain-containing peptide sequence
RKRIGIENPRK

SEQ ID NO: 3538 - protein, 11 aa, Artificial
  IGFBP-2 heparin binding domain-containing peptide sequence
HKRIGIENPRK

SEQ ID NO: 3539 - protein, 11 aa, Artificial
  IGFBP-2 heparin binding domain-containing peptide sequence
KRRIGIENPRK

SEQ ID NO: 3540 - protein, 11 aa, Artificial
  IGFBP-2 heparin binding domain-containing peptide sequence
RRRIGIENPRK

SEQ ID NO: 3541 - protein, 11 aa, Artificial
  IGFBP-2 heparin binding domain-containing peptide sequence
HRRIGIENPRK

SEQ ID NO: 3542 - protein, 11 aa, Artificial
  IGFBP-2 heparin binding domain-containing peptide sequence
KHHVGIENPRK

SEQ ID NO: 3543 - protein, 11 aa, Artificial
  IGFBP-2 heparin binding domain-containing peptide sequence
RHHVGIENPRK

SEQ ID NO: 3544 - protein, 11 aa, Artificial
  IGFBP-2 heparin binding domain-containing peptide sequence
HHHVGIENPRK

SEQ ID NO: 3545 - protein, 11 aa, Artificial
  IGFBP-2 heparin binding domain-containing peptide sequence
KKHVGIENPRK

SEQ ID NO: 3546 - protein, 11 aa, Artificial
  IGFBP-2 heparin binding domain-containing peptide sequence
RKHVGIENPRK

SEQ ID NO: 3547 - protein, 11 aa, Artificial
  IGFBP-2 heparin binding domain-containing peptide sequence
HKHVGIENPRK

SEQ ID NO: 3548 - protein, 11 aa, Artificial
  IGFBP-2 heparin binding domain-containing peptide sequence
KRHVGIENPRK

SEQ ID NO: 3549 - protein, 11 aa, Artificial
  IGFBP-2 heparin binding domain-containing peptide sequence
RRHVGIENPRK

SEQ ID NO: 3550 - protein, 11 aa, Artificial
  IGFBP-2 heparin binding domain-containing peptide sequence
HRHVGIENPRK

SEQ ID NO: 3551 - protein, 11 aa, Artificial
  IGFBP-2 heparin binding domain-containing peptide sequence
KHKVGIENPRK

SEQ ID NO: 3552 - protein, 11 aa, Artificial
  IGFBP-2 heparin binding domain-containing peptide sequence
RHKVGIENPRK

SEQ ID NO: 3553 - protein, 11 aa, Artificial
  IGFBP-2 heparin binding domain-containing peptide sequence
HHKVGIENPRK

SEQ ID NO: 3554 - protein, 11 aa, Artificial
  IGFBP-2 heparin binding domain-containing peptide sequence
KKKVGIENPRK

SEQ ID NO: 3555 - protein, 11 aa, Artificial
  IGFBP-2 heparin binding domain-containing peptide sequence
RKKVGIENPRK

SEQ ID NO: 3556 - protein, 11 aa, Artificial
  IGFBP-2 heparin binding domain-containing peptide sequence
HKKVGIENPRK

SEQ ID NO: 3557 - protein, 11 aa, Artificial
  IGFBP-2 heparin binding domain-containing peptide sequence
KRKVGIENPRK

SEQ ID NO: 3558 - protein, 11 aa, Artificial
  IGFBP-2 heparin binding domain-containing peptide sequence
RRKVGIENPRK

SEQ ID NO: 3559 - protein, 11 aa, Artificial
  IGFBP-2 heparin binding domain-containing peptide sequence
HRKVGIENPRK

SEQ ID NO: 3560 - protein, 11 aa, Artificial
  IGFBP-2 heparin binding domain-containing peptide sequence
KHRVGIENPRK

SEQ ID NO: 3561 - protein, 11 aa, Artificial
  IGFBP-2 heparin binding domain-containing peptide sequence
RHRVGIENPRK

SEQ ID NO: 3562 - protein, 11 aa, Artificial
  IGFBP-2 heparin binding domain-containing peptide sequence
HHRVGIENPRK

SEQ ID NO: 3563 - protein, 11 aa, Artificial
  IGFBP-2 heparin binding domain-containing peptide sequence
KKRVGIENPRK

SEQ ID NO: 3564 - protein, 11 aa, Artificial
  IGFBP-2 heparin binding domain-containing peptide sequence
RKRVGIENPRK

SEQ ID NO: 3565 - protein, 11 aa, Artificial
  IGFBP-2 heparin binding domain-containing peptide sequence
HKRVGIENPRK

SEQ ID NO: 3566 - protein, 11 aa, Artificial
  IGFBP-2 heparin binding domain-containing peptide sequence
KRRVGIENPRK

SEQ ID NO: 3567 - protein, 11 aa, Artificial
  IGFBP-2 heparin binding domain-containing peptide sequence
RRRVGIENPRK

SEQ ID NO: 3568 - protein, 11 aa, Artificial
  IGFBP-2 heparin binding domain-containing peptide sequence
HRRVGIENPRK

SEQ ID NO: 3569 - protein, 11 aa, Artificial
  IGFBP-2 heparin binding domain-containing peptide sequence
KHHLGVENPRK

SEQ ID NO: 3570 - protein, 11 aa, Artificial
  IGFBP-2 heparin binding domain-containing peptide sequence
RHHLGVENPRK

SEQ ID NO: 3571 - protein, 11 aa, Artificial
  IGFBP-2 heparin binding domain-containing peptide sequence
HHHLGVENPRK

SEQ ID NO: 3572 - protein, 11 aa, Artificial
  IGFBP-2 heparin binding domain-containing peptide sequence
KKHLGVENPRK

SEQ ID NO: 3573 - protein, 11 aa, Artificial
  IGFBP-2 heparin binding domain-containing peptide sequence
RKHLGVENPRK

SEQ ID NO: 3574 - protein, 11 aa, Artificial
  IGFBP-2 heparin binding domain-containing peptide sequence
HKHLGVENPRK

SEQ ID NO: 3575 - protein, 11 aa, Artificial
  IGFBP-2 heparin binding domain-containing peptide sequence
KRHLGVENPRK

SEQ ID NO: 3576 - protein, 11 aa, Artificial
  IGFBP-2 heparin binding domain-containing peptide sequence
RRHLGVENPRK

SEQ ID NO: 3577 - protein, 11 aa, Artificial
  IGFBP-2 heparin binding domain-containing peptide sequence
HRHLGVENPRK

SEQ ID NO: 3578 - protein, 11 aa, Artificial
  IGFBP-2 heparin binding domain-containing peptide sequence
KHKLGVENPRK

SEQ ID NO: 3579 - protein, 11 aa, Artificial
  IGFBP-2 heparin binding domain-containing peptide sequence
RHKLGVENPRK

SEQ ID NO: 3580 - protein, 11 aa, Artificial
  IGFBP-2 heparin binding domain-containing peptide sequence
HHKLGVENPRK

SEQ ID NO: 3581 - protein, 11 aa, Artificial
  IGFBP-2 heparin binding domain-containing peptide sequence
KKKLGVENPRK

SEQ ID NO: 3582 - protein, 11 aa, Artificial
  IGFBP-2 heparin binding domain-containing peptide sequence
RKKLGVENPRK

SEQ ID NO: 3583 - protein, 11 aa, Artificial
  IGFBP-2 heparin binding domain-containing peptide sequence
HKKLGVENPRK

SEQ ID NO: 3584 - protein, 11 aa, Artificial
  IGFBP-2 heparin binding domain-containing peptide sequence
KRKLGVENPRK

SEQ ID NO: 3585 - protein, 11 aa, Artificial
  IGFBP-2 heparin binding domain-containing peptide sequence
RRKLGVENPRK

SEQ ID NO: 3586 - protein, 11 aa, Artificial
  IGFBP-2 heparin binding domain-containing peptide sequence
HRKLGVENPRK

SEQ ID NO: 3587 - protein, 11 aa, Artificial
  IGFBP-2 heparin binding domain-containing peptide sequence
KHRLGVENPRK

SEQ ID NO: 3588 - protein, 11 aa, Artificial
  IGFBP-2 heparin binding domain-containing peptide sequence
RHRLGVENPRK

SEQ ID NO: 3589 - protein, 11 aa, Artificial
  IGFBP-2 heparin binding domain-containing peptide sequence
HHRLGVENPRK

SEQ ID NO: 3590 - protein, 11 aa, Artificial
  IGFBP-2 heparin binding domain-containing peptide sequence
KKRLGVENPRK

SEQ ID NO: 3591 - protein, 11 aa, Artificial
  IGFBP-2 heparin binding domain-containing peptide sequence
RKRLGVENPRK

SEQ ID NO: 3592 - protein, 11 aa, Artificial
  IGFBP-2 heparin binding domain-containing peptide sequence
HKRLGVENPRK

SEQ ID NO: 3593 - protein, 11 aa, Artificial
  IGFBP-2 heparin binding domain-containing peptide sequence
KRRLGVENPRK

SEQ ID NO: 3594 - protein, 11 aa, Artificial
  IGFBP-2 heparin binding domain-containing peptide sequence
RRRLGVENPRK

SEQ ID NO: 3595 - protein, 11 aa, Artificial
  IGFBP-2 heparin binding domain-containing peptide sequence
HRRLGVENPRK

SEQ ID NO: 3596 - protein, 11 aa, Artificial
  IGFBP-2 heparin binding domain-containing peptide sequence
KHHIGVENPRK

SEQ ID NO: 3597 - protein, 11 aa, Artificial
  IGFBP-2 heparin binding domain-containing peptide sequence
RHHIGVEEPRK

SEQ ID NO: 3598 - protein, 11 aa, Artificial
  IGFBP-2 heparin binding domain-containing peptide sequence
HHHIGVENPRK

SEQ ID NO: 3599 - protein, 11 aa, Artificial
  IGFBP-2 heparin binding domain-containing peptide sequence
KKHIGVENPRK

SEQ ID NO: 3600 - protein, 11 aa, Artificial
  IGFBP-2 heparin binding domain-containing peptide sequence
RKHIGVENPRK

SEQ ID NO: 3601 - protein, 11 aa, Artificial
  IGFBP-2 heparin binding domain-containing peptide sequence
HKHIGVENPRK

SEQ ID NO: 3602 - protein, 11 aa, Artificial
  IGFBP-2 heparin binding domain-containing peptide sequence
KRHIGVENPRK

SEQ ID NO: 3603 - protein, 11 aa, Artificial
  IGFBP-2 heparin binding domain-containing peptide sequence
RRHIGVENPRK

SEQ ID NO: 3604 - protein, 11 aa, Artificial
  IGFBP-2 heparin binding domain-containing peptide sequence
HRHIGVENPRK

SEQ ID NO: 3605 - protein, 11 aa, Artificial
  IGFBP-2 heparin binding domain-containing peptide sequence
KHKIGVENPRK

SEQ ID NO: 3606 - protein, 11 aa, Artificial
  IGFBP-2 heparin binding domain-containing peptide sequence
RHKIGVENPRK

SEQ ID NO: 3607 - protein, 11 aa, Artificial
  IGFBP-2 heparin binding domain-containing peptide sequence
HHKIGVENPRK

SEQ ID NO: 3608 - protein, 11 aa, Artificial
  IGFBP-2 heparin binding domain-containing peptide sequence
KKKIGVENPRK

SEQ ID NO: 3609 - protein, 11 aa, Artificial
  IGFBP-2 heparin binding domain-containing peptide sequence
RKKIGVENPRK

SEQ ID NO: 3610 - protein, 11 aa, Artificial
  IGFBP-2 heparin binding domain-containing peptide sequence
HKKIGVENPRK

SEQ ID NO: 3611 - protein, 11 aa, Artificial
  IGFBP-2 heparin binding domain-containing peptide sequence
KRKIGVENPRK

SEQ ID NO: 3612 - protein, 11 aa, Artificial
  IGFBP-2 heparin binding domain-containing peptide sequence
RRKIGVENPRK

SEQ ID NO: 3613 - protein, 11 aa, Artificial
  IGFBP-2 heparin binding domain-containing peptide sequence
HRKIGVENPRK

SEQ ID NO: 3614 - protein, 11 aa, Artificial
  IGFBP-2 heparin binding domain-containing peptide sequence
KHRIGVENPRK

SEQ ID NO: 3615 - protein, 11 aa, Artificial
  IGFBP-2 heparin binding domain-containing peptide sequence
RHRIGVENPRK

SEQ ID NO: 3616 - protein, 11 aa, Artificial
  IGFBP-2 heparin binding domain-containing peptide sequence
HHRIGVENPRK

SEQ ID NO: 3617 - protein, 11 aa, Artificial
  IGFBP-2 heparin binding domain-containing peptide sequence
KKRIGVENPRK

SEQ ID NO: 3618 - protein, 11 aa, Artificial
  IGFBP-2 heparin binding domain-containing peptide sequence
RKRIGVENPRK

SEQ ID NO: 3619 - protein, 11 aa, Artificial
  IGFBP-2 heparin binding domain-containing peptide sequence
HKRIGVENPRK

SEQ ID NO: 3620 - protein, 11 aa, Artificial
  IGFBP-2 heparin binding domain-containing peptide sequence
KRRIGVENPRK

SEQ ID NO: 3621 - protein, 11 aa, Artificial
  IGFBP-2 heparin binding domain-containing peptide sequence
RRRIGVENPRK

SEQ ID NO: 3622 - protein, 11 aa, Artificial
  IGFBP-2 heparin binding domain-containing peptide sequence
HRRIGVENPRK

SEQ ID NO: 3623 - protein, 11 aa, Artificial
  IGFBP-2 heparin binding domain-containing peptide sequence
KHHVGVENPRK

SEQ ID NO: 3624 - protein, 11 aa, Artificial
  IGFBP-2 heparin binding domain-containing peptide sequence
RHHVGVENPRK

SEQ ID NO: 3625 - protein, 11 aa, Artificial
  IGFBP-2 heparin binding domain-containing peptide sequence
HHHVGVENPRK

SEQ ID NO: 3626 - protein, 11 aa, Artificial
  IGFBP-2 heparin binding domain-containing peptide sequence
KKHVGVENPRK

SEQ ID NO: 3627 - protein, 11 aa, Artificial
  IGFBP-2 heparin binding domain-containing peptide sequence
RKHVGVENPRK

SEQ ID NO: 3628 - protein, 11 aa, Artificial
  IGFBP-2 heparin binding domain-containing peptide sequence
HKHVGVENPRK

SEQ ID NO: 3629 - protein, 11 aa, Artificial
  IGFBP-2 heparin binding domain-containing peptide sequence
KRHVGVENPRK

SEQ ID NO: 3630 - protein, 11 aa, Artificial
  IGFBP-2 heparin binding domain-containing peptide sequence
RRHVGVENPRK

SEQ ID NO: 3631 - protein, 11 aa, Artificial
  IGFBP-2 heparin binding domain-containing peptide sequence
HRHVGVENPRK

SEQ ID NO: 3632 - protein, 11 aa, Artificial
  IGFBP-2 heparin binding domain-containing peptide sequence
KHKVGVENPRK

SEQ ID NO: 3633 - protein, 11 aa, Artificial
  IGFBP-2 heparin binding domain-containing peptide sequence
RHKVGVENPRK

SEQ ID NO: 3634 - protein, 11 aa, Artificial
  IGFBP-2 heparin binding domain-containing peptide sequence
HHKVGVENPRK

SEQ ID NO: 3635 - protein, 11 aa, Artificial
  IGFBP-2 heparin binding domain-containing peptide sequence
KKKVGVENPRK

SEQ ID NO: 3636 - protein, 11 aa, Artificial
  IGFBP-2 heparin binding domain-containing peptide sequence
RKKVGVENPRK

SEQ ID NO: 3637 - protein, 11 aa, Artificial
  IGFBP-2 heparin binding domain-containing peptide sequence
HKKVGVENPRK

SEQ ID NO: 3638 - protein, 11 aa, Artificial
  IGFBP-2 heparin binding domain-containing peptide sequence
KRKVGVENPRK

SEQ ID NO: 3639 - protein, 11 aa, Artificial
  IGFBP-2 heparin binding domain-containing peptide sequence
RRKVGVEEPRK

SEQ ID NO: 3640 - protein, 11 aa, Artificial
  IGFBP-2 heparin binding domain-containing peptide sequence
HRKVGVENPRK

SEQ ID NO: 3641 - protein, 11 aa, Artificial
  IGFBP-2 heparin binding domain-containing peptide sequence
KHRVGVENPRK

SEQ ID NO: 3642 - protein, 11 aa, Artificial
  IGFBP-2 heparin binding domain-containing peptide sequence
RHRVGVENPRK

SEQ ID NO: 3643 - protein, 11 aa, Artificial
  IGFBP-2 heparin binding domain-containing peptide sequence
HHRVGVENPRK

SEQ ID NO: 3644 - protein, 11 aa, Artificial
  IGFBP-2 heparin binding domain-containing peptide sequence
KKRVGVENPRK

SEQ ID NO: 3645 - protein, 11 aa, Artificial
  IGFBP-2 heparin binding domain-containing peptide sequence
RKRVGVENPRK

SEQ ID NO: 3646 - protein, 11 aa, Artificial
  IGFBP-2 heparin binding domain-containing peptide sequence
HKRVGVENPRK

SEQ ID NO: 3647 - protein, 11 aa, Artificial
  IGFBP-2 heparin binding domain-containing peptide sequence
KRRVGVENPRK

SEQ ID NO: 3648 - protein, 11 aa, Artificial
  IGFBP-2 heparin binding domain-containing peptide sequence
RRRVGVENPRK

SEQ ID NO: 3649 - protein, 11 aa, Artificial
  IGFBP-2 heparin binding domain-containing peptide sequence
HRRVGVENPRK

SEQ ID NO: 3650 - protein, 11 aa, Artificial
  IGFBP-2 heparin binding domain-containing peptide sequence
KHHLGLNNPRK

SEQ ID NO: 3651 - protein, 11 aa, Artificial
  IGFBP-2 heparin binding domain-containing peptide sequence
RHHLGLNNPRK

SEQ ID NO: 3652 - protein, 11 aa, Artificial
  IGFBP-2 heparin binding domain-containing peptide sequence
HHHLGLNNPRK

SEQ ID NO: 3653 - protein, 11 aa, Artificial
  IGFBP-2 heparin binding domain-containing peptide sequence
KKHLGLNNPRK

SEQ ID NO: 3654 - protein, 11 aa, Artificial
  IGFBP-2 heparin binding domain-containing peptide sequence
RKHLGLNNPRK

SEQ ID NO: 3655 - protein, 11 aa, Artificial
  IGFBP-2 heparin binding domain-containing peptide sequence
HKHLGLNNPRK

SEQ ID NO: 3656 - protein, 11 aa, Artificial
  IGFBP-2 heparin binding domain-containing peptide sequence
KRHLGLNNPRK

SEQ ID NO: 3657 - protein, 11 aa, Artificial
  IGFBP-2 heparin binding domain-containing peptide sequence
RRHLGLNNPRK

SEQ ID NO: 3658 - protein, 11 aa, Artificial
  IGFBP-2 heparin binding domain-containing peptide sequence
HRHLGLNNPRK

SEQ ID NO: 3659 - protein, 11 aa, Artificial
  IGFBP-2 heparin binding domain-containing peptide sequence
KHKLGLNNPRK

SEQ ID NO: 3660 - protein, 11 aa, Artificial
  IGFBP-2 heparin binding domain-containing peptide sequence
RHKLGLNNPRK

SEQ ID NO: 3661 - protein, 11 aa, Artificial
  IGFBP-2 heparin binding domain-containing peptide sequence
HHKLGLNNPRK

SEQ ID NO: 3662 - protein, 11 aa, Artificial
  IGFBP-2 heparin binding domain-containing peptide sequence
KKKLGLNNPRK

SEQ ID NO: 3663 - protein, 11 aa, Artificial
  IGFBP-2 heparin binding domain-containing peptide sequence
RKKLGLNNPRK

SEQ ID NO: 3664 - protein, 11 aa, Artificial
  IGFBP-2 heparin binding domain-containing peptide sequence
HKKLGLNNPRK

SEQ ID NO: 3665 - protein, 11 aa, Artificial
  IGFBP-2 heparin binding domain-containing peptide sequence
KRKLGLNNPRK

SEQ ID NO: 3666 - protein, 11 aa, Artificial
  IGFBP-2 heparin binding domain-containing peptide sequence
RRKLGLNNPRK

SEQ ID NO: 3667 - protein, 11 aa, Artificial
  IGFBP-2 heparin binding domain-containing peptide sequence
HRKLGLNNPRK

SEQ ID NO: 3668 - protein, 11 aa, Artificial
  IGFBP-2 heparin binding domain-containing peptide sequence
KHRLGLNNPRK

SEQ ID NO: 3669 - protein, 11 aa, Artificial
  IGFBP-2 heparin binding domain-containing peptide sequence
RHRLGLNNPRK

SEQ ID NO: 3670 - protein, 11 aa, Artificial
  IGFBP-2 heparin binding domain-containing peptide sequence
HHRLGLNNPRK

SEQ ID NO: 3671 - protein, 11 aa, Artificial
  IGFBP-2 heparin binding domain-containing peptide sequence
KKRLGLNNPRK

SEQ ID NO: 3672 - protein, 11 aa, Artificial
  IGFBP-2 heparin binding domain-containing peptide sequence
RKRLGLNNPRK

SEQ ID NO: 3673 - protein, 11 aa, Artificial
  IGFBP-2 heparin binding domain-containing peptide sequence
HKRLGLNNPRK

SEQ ID NO: 3674 - protein, 11 aa, Artificial
  IGFBP-2 heparin binding domain-containing peptide sequence
KRRLGLNNPRK

SEQ ID NO: 3675 - protein, 11 aa, Artificial
  IGFBP-2 heparin binding domain-containing peptide sequence
RRRLGLNNPRK

SEQ ID NO: 3676 - protein, 11 aa, Artificial
  IGFBP-2 heparin binding domain-containing peptide sequence
HRRLGLNNPRK

SEQ ID NO: 3677 - protein, 11 aa, Artificial
  IGFBP-2 heparin binding domain-containing peptide sequence
KHHIGLNNPRK

SEQ ID NO: 3678 - protein, 11 aa, Artificial
  IGFBP-2 heparin binding domain-containing peptide sequence
RHHIGLNNPRK

SEQ ID NO: 3679 - protein, 11 aa, Artificial
  IGFBP-2 heparin binding domain-containing peptide sequence
HHHIGLNNPRK

SEQ ID NO: 3680 - protein, 11 aa, Artificial
  IGFBP-2 heparin binding domain-containing peptide sequence
KKHIGLNNPRK

SEQ ID NO: 3681 - protein, 11 aa, Artificial
  IGFBP-2 heparin binding domain-containing peptide sequence
RKHIGLNNPRK

SEQ ID NO: 3682 - protein, 11 aa, Artificial
  IGFBP-2 heparin binding domain-containing peptide sequence
HKHIGLNNPRK

SEQ ID NO: 3683 - protein, 11 aa, Artificial
  IGFBP-2 heparin binding domain-containing peptide sequence
KRHIGLNNPRK

SEQ ID NO: 3684 - protein, 11 aa, Artificial
  IGFBP-2 heparin binding domain-containing peptide sequence
RRHIGLNNPRK

SEQ ID NO: 3685 - protein, 11 aa, Artificial
  IGFBP-2 heparin binding domain-containing peptide sequence
HRHIGLNNPRK

SEQ ID NO: 3686 - protein, 11 aa, Artificial
  IGFBP-2 heparin binding domain-containing peptide sequence
KHKIGLNNPRK

SEQ ID NO: 3687 - protein, 11 aa, Artificial
  IGFBP-2 heparin binding domain-containing peptide sequence
RHKIGLNNPRK

SEQ ID NO: 3688 - protein, 11 aa, Artificial
  IGFBP-2 heparin binding domain-containing peptide sequence
HHKIGLNNPRK

SEQ ID NO: 3689 - protein, 11 aa, Artificial
  IGFBP-2 heparin binding domain-containing peptide sequence
KKKIGLNNPRK

SEQ ID NO: 3690 - protein, 11 aa, Artificial
  IGFBP-2 heparin binding domain-containing peptide sequence
RKKIGLNNPRK

SEQ ID NO: 3691 - protein, 11 aa, Artificial
  IGFBP-2 heparin binding domain-containing peptide sequence
HKKIGLNNPRK

SEQ ID NO: 3692 - protein, 11 aa, Artificial
  IGFBP-2 heparin binding domain-containing peptide sequence
KRKIGLNNPRK

SEQ ID NO: 3693 - protein, 11 aa, Artificial
  IGFBP-2 heparin binding domain-containing peptide sequence
RRKIGLNNPRK

SEQ ID NO: 3694 - protein, 11 aa, Artificial
  IGFBP-2 heparin binding domain-containing peptide sequence
HRKIGLNNPRK

SEQ ID NO: 3695 - protein, 11 aa, Artificial
  IGFBP-2 heparin binding domain-containing peptide sequence
KHRIGLNNPRK

SEQ ID NO: 3696 - protein, 11 aa, Artificial
  IGFBP-2 heparin binding domain-containing peptide sequence
RHRIGLNNPRK

SEQ ID NO: 3697 - protein, 11 aa, Artificial
  IGFBP-2 heparin binding domain-containing peptide sequence
HHRIGLNNPRK

SEQ ID NO: 3698 - protein, 11 aa, Artificial
  IGFBP-2 heparin binding domain-containing peptide sequence
KKRIGLNNPRK

SEQ ID NO: 3699 - protein, 11 aa, Artificial
  IGFBP-2 heparin binding domain-containing peptide sequence
RKRIGLNNPRK

SEQ ID NO: 3700 - protein, 11 aa, Artificial
  IGFBP-2 heparin binding domain-containing peptide sequence
HKRIGLNNPRK

SEQ ID NO: 3701 - protein, 11 aa, Artificial
  IGFBP-2 heparin binding domain-containing peptide sequence
KRRIGLNNPRK

SEQ ID NO: 3702 - protein, 11 aa, Artificial
  IGFBP-2 heparin binding domain-containing peptide sequence
RRRIGLNNPRK

SEQ ID NO: 3703 - protein, 11 aa, Artificial
  IGFBP-2 heparin binding domain-containing peptide sequence
HRRIGLNNPRK

SEQ ID NO: 3704 - protein, 11 aa, Artificial
  IGFBP-2 heparin binding domain-containing peptide sequence
KHHVGLNNPRK

SEQ ID NO: 3705 - protein, 11 aa, Artificial
  IGFBP-2 heparin binding domain-containing peptide sequence
RHHVGLNNPRK

SEQ ID NO: 3706 - protein, 11 aa, Artificial
  IGFBP-2 heparin binding domain-containing peptide sequence
HHHVGLNNPRK

SEQ ID NO: 3707 - protein, 11 aa, Artificial
  IGFBP-2 heparin binding domain-containing peptide sequence
KKHVGLNNPRK

SEQ ID NO: 3708 - protein, 11 aa, Artificial
  IGFBP-2 heparin binding domain-containing peptide sequence
RKHVGLNNPRK

SEQ ID NO: 3709 - protein, 11 aa, Artificial
  IGFBP-2 heparin binding domain-containing peptide sequence
HKHVGLNNPRK

SEQ ID NO: 3710 - protein, 11 aa, Artificial
  IGFBP-2 heparin binding domain-containing peptide sequence
KRHVGLNNPRK

SEQ ID NO: 3711 - protein, 11 aa, Artificial
  IGFBP-2 heparin binding domain-containing peptide sequence
RRHVGLNNPRK

SEQ ID NO: 3712 - protein, 11 aa, Artificial
  IGFBP-2 heparin binding domain-containing peptide sequence
HRHVGLNNPRK

SEQ ID NO: 3713 - protein, 11 aa, Artificial
  IGFBP-2 heparin binding domain-containing peptide sequence
KHKVGLNNPRK

SEQ ID NO: 3714 - protein, 11 aa, Artificial
  IGFBP-2 heparin binding domain-containing peptide sequence
RHKVGLNNPRK

SEQ ID NO: 3715 - protein, 11 aa, Artificial
  IGFBP-2 heparin binding domain-containing peptide sequence
HHKVGLNNPRK

SEQ ID NO: 3716 - protein, 11 aa, Artificial
  IGFBP-2 heparin binding domain-containing peptide sequence
KKKVGLNNPRK

SEQ ID NO: 3717 - protein, 11 aa, Artificial
  IGFBP-2 heparin binding domain-containing peptide sequence
RKKVGLNNPRK

SEQ ID NO: 3718 - protein, 11 aa, Artificial
  IGFBP-2 heparin binding domain-containing peptide sequence
HKKVGLNNPRK

SEQ ID NO: 3719 - protein, 11 aa, Artificial
  IGFBP-2 heparin binding domain-containing peptide sequence
KRKVGLNNPRK

SEQ ID NO: 3720 - protein, 11 aa, Artificial
  IGFBP-2 heparin binding domain-containing peptide sequence
RRKVGLNNPRK

SEQ ID NO: 3721 - protein, 11 aa, Artificial
  IGFBP-2 heparin binding domain-containing peptide sequence
HRKVGLNNPRK

SEQ ID NO: 3722 - protein, 11 aa, Artificial
  IGFBP-2 heparin binding domain-containing peptide sequence
KHRVGLNNPRK

SEQ ID NO: 3723 - protein, 11 aa, Artificial
  IGFBP-2 heparin binding domain-containing peptide sequence
RHRVGLNNPRK

SEQ ID NO: 3724 - protein, 11 aa, Artificial
  IGFBP-2 heparin binding domain-containing peptide sequence
HHRVGLNNPRK

SEQ ID NO: 3725 - protein, 11 aa, Artificial
  IGFBP-2 heparin binding domain-containing peptide sequence
KKRVGLNNPRK

SEQ ID NO: 3726 - protein, 11 aa, Artificial
  IGFBP-2 heparin binding domain-containing peptide sequence
RKRVGLNNPRK

SEQ ID NO: 3727 - protein, 11 aa, Artificial
  IGFBP-2 heparin binding domain-containing peptide sequence
HKRVGLNNPRK

SEQ ID NO: 3728 - protein, 11 aa, Artificial
  IGFBP-2 heparin binding domain-containing peptide sequence
KRRVGLNNPRK

SEQ ID NO: 3729 - protein, 11 aa, Artificial
  IGFBP-2 heparin binding domain-containing peptide sequence
RRRVGLNNPRK

SEQ ID NO: 3730 - protein, 11 aa, Artificial
  IGFBP-2 heparin binding domain-containing peptide sequence
HRRVGLNNPRK

SEQ ID NO: 3731 - protein, 11 aa, Artificial
  IGFBP-2 heparin binding domain-containing peptide sequence
KHHLGINNPRK

SEQ ID NO: 3732 - protein, 11 aa, Artificial
  IGFBP-2 heparin binding domain-containing peptide sequence
RHHLGINNPRK

SEQ ID NO: 3733 - protein, 11 aa, Artificial
  IGFBP-2 heparin binding domain-containing peptide sequence
HHHLGINNPRK

SEQ ID NO: 3734 - protein, 11 aa, Artificial
  IGFBP-2 heparin binding domain-containing peptide sequence
KKHLGINNPRK

SEQ ID NO: 3735 - protein, 11 aa, Artificial
  IGFBP-2 heparin binding domain-containing peptide sequence
RKHLGINNPRK

SEQ ID NO: 3736 - protein, 11 aa, Artificial
  IGFBP-2 heparin binding domain-containing peptide sequence
HKHLGINNPRK

SEQ ID NO: 3737 - protein, 11 aa, Artificial
  IGFBP-2 heparin binding domain-containing peptide sequence
KRHLGINNPRK

SEQ ID NO: 3738 - protein, 11 aa, Artificial
  IGFBP-2 heparin binding domain-containing peptide sequence
RRHLGINNPRK

SEQ ID NO: 3739 - protein, 11 aa, Artificial
  IGFBP-2 heparin binding domain-containing peptide sequence
HRHLGINNPRK

SEQ ID NO: 3740 - protein, 11 aa, Artificial
  IGFBP-2 heparin binding domain-containing peptide sequence
KHKLGINNPRK

SEQ ID NO: 3741 - protein, 11 aa, Artificial
  IGFBP-2 heparin binding domain-containing peptide sequence
RHKLGINNPRK

SEQ ID NO: 3742 - protein, 11 aa, Artificial
  IGFBP-2 heparin binding domain-containing peptide sequence
HHKLGINNPRK

SEQ ID NO: 3743 - protein, 11 aa, Artificial
  IGFBP-2 heparin binding domain-containing peptide sequence
KKKLGINNPRK

SEQ ID NO: 3744 - protein, 11 aa, Artificial
  IGFBP-2 heparin binding domain-containing peptide sequence
RKKLGINNPRK

SEQ ID NO: 3745 - protein, 11 aa, Artificial
  IGFBP-2 heparin binding domain-containing peptide sequence
HKKLGINNPRK

SEQ ID NO: 3746 - protein, 11 aa, Artificial
  IGFBP-2 heparin binding domain-containing peptide sequence
KRKLGINNPRK

SEQ ID NO: 3747 - protein, 11 aa, Artificial
  IGFBP-2 heparin binding domain-containing peptide sequence
RRKLGINNPRK

SEQ ID NO: 3748 - protein, 11 aa, Artificial
  IGFBP-2 heparin binding domain-containing peptide sequence
HRKLGINNPRK

SEQ ID NO: 3749 - protein, 11 aa, Artificial
  IGFBP-2 heparin binding domain-containing peptide sequence
KHRLGINNPRK

SEQ ID NO: 3750 - protein, 11 aa, Artificial
  IGFBP-2 heparin binding domain-containing peptide sequence
RHRLGINNPRK

SEQ ID NO: 3751 - protein, 11 aa, Artificial
  IGFBP-2 heparin binding domain-containing peptide sequence
HHRLGINNPRK

SEQ ID NO: 3752 - protein, 11 aa, Artificial
  IGFBP-2 heparin binding domain-containing peptide sequence
KKRLGINNPRK

SEQ ID NO: 3753 - protein, 11 aa, Artificial
  IGFBP-2 heparin binding domain-containing peptide sequence
RKRLGINNPRK

SEQ ID NO: 3754 - protein, 11 aa, Artificial
  IGFBP-2 heparin binding domain-containing peptide sequence
HKRLGINNPRK

SEQ ID NO: 3755 - protein, 11 aa, Artificial
  IGFBP-2 heparin binding domain-containing peptide sequence
KRRLGINNPRK

SEQ ID NO: 3756 - protein, 11 aa, Artificial
  IGFBP-2 heparin binding domain-containing peptide sequence
RRRLGINNPRK

SEQ ID NO: 3757 - protein, 11 aa, Artificial
  IGFBP-2 heparin binding domain-containing peptide sequence
HRRLGINNPRK

SEQ ID NO: 3758 - protein, 11 aa, Artificial
  IGFBP-2 heparin binding domain-containing peptide sequence
KHHIGIENPRK

SEQ ID NO: 3759 - protein, 11 aa, Artificial
  IGFBP-2 heparin binding domain-containing peptide sequence
RHHIGINNPRK

SEQ ID NO: 3760 - protein, 11 aa, Artificial
  IGFBP-2 heparin binding domain-containing peptide sequence
HHHIGINNPRK

SEQ ID NO: 3761 - protein, 11 aa, Artificial
  IGFBP-2 heparin binding domain-containing peptide sequence
KKHIGINNPRK

SEQ ID NO: 3762 - protein, 11 aa, Artificial
  IGFBP-2 heparin binding domain-containing peptide sequence
RKHIGINNPRK

SEQ ID NO: 3763 - protein, 11 aa, Artificial
  IGFBP-2 heparin binding domain-containing peptide sequence
HKHIGINNPRK

SEQ ID NO: 3764 - protein, 11 aa, Artificial
  IGFBP-2 heparin binding domain-containing peptide sequence
KRHIGINNPRK

SEQ ID NO: 3765 - protein, 11 aa, Artificial
  IGFBP-2 heparin binding domain-containing peptide sequence
RRHIGINNPRK

SEQ ID NO: 3766 - protein, 11 aa, Artificial
  IGFBP-2 heparin binding domain-containing peptide sequence
HRHIGINNPRK

SEQ ID NO: 3767 - protein, 11 aa, Artificial
  IGFBP-2 heparin binding domain-containing peptide sequence
KHKIGINNPRK

SEQ ID NO: 3768 - protein, 11 aa, Artificial
  IGFBP-2 heparin binding domain-containing peptide sequence
RHKIGINNPRK

SEQ ID NO: 3769 - protein, 11 aa, Artificial
  IGFBP-2 heparin binding domain-containing peptide sequence
HHKIGINNPRK

SEQ ID NO: 3770 - protein, 11 aa, Artificial
  IGFBP-2 heparin binding domain-containing peptide sequence
KKKIGINNPRK

SEQ ID NO: 3771 - protein, 11 aa, Artificial
  IGFBP-2 heparin binding domain-containing peptide sequence
RKKIGINNPRK

SEQ ID NO: 3772 - protein, 11 aa, Artificial
  IGFBP-2 heparin binding domain-containing peptide sequence
HKKIGINNPRK

SEQ ID NO: 3773 - protein, 11 aa, Artificial
  IGFBP-2 heparin binding domain-containing peptide sequence
KRKIGINNPRK

SEQ ID NO: 3774 - protein, 11 aa, Artificial
  IGFBP-2 heparin binding domain-containing peptide sequence
RRKIGINNPRK

SEQ ID NO: 3775 - protein, 11 aa, Artificial
  IGFBP-2 heparin binding domain-containing peptide sequence
HRKIGINNPRK

SEQ ID NO: 3776 - protein, 11 aa, Artificial
  IGFBP-2 heparin binding domain-containing peptide sequence
KHRIGINNPRK

SEQ ID NO: 3777 - protein, 11 aa, Artificial
  IGFBP-2 heparin binding domain-containing peptide sequence
RHRIGINNPRK

SEQ ID NO: 3778 - protein, 11 aa, Artificial
  IGFBP-2 heparin binding domain-containing peptide sequence
HHRIGINNPRK

SEQ ID NO: 3779 - protein, 11 aa, Artificial
  IGFBP-2 heparin binding domain-containing peptide sequence
KKRIGINNPRK

SEQ ID NO: 3780 - protein, 11 aa, Artificial
  IGFBP-2 heparin binding domain-containing peptide sequence
RKRIGINNPRK

SEQ ID NO: 3781 - protein, 11 aa, Artificial
  IGFBP-2 heparin binding domain-containing peptide sequence
HKRIGINNPRK

SEQ ID NO: 3782 - protein, 11 aa, Artificial
  IGFBP-2 heparin binding domain-containing peptide sequence
KRRIGINNPRK

SEQ ID NO: 3783 - protein, 11 aa, Artificial
  IGFBP-2 heparin binding domain-containing peptide sequence
RRRIGINNPRK

SEQ ID NO: 3784 - protein, 11 aa, Artificial
  IGFBP-2 heparin binding domain-containing peptide sequence
HRRIGINNPRK

SEQ ID NO: 3785 - protein, 11 aa, Artificial
  IGFBP-2 heparin binding domain-containing peptide sequence
KHHVGINNPRK

SEQ ID NO: 3786 - protein, 11 aa, Artificial
  IGFBP-2 heparin binding domain-containing peptide sequence
RHHVGINNPRK

SEQ ID NO: 3787 - protein, 11 aa, Artificial
  IGFBP-2 heparin binding domain-containing peptide sequence
HHHVGINNPRK

SEQ ID NO: 3788 - protein, 11 aa, Artificial
  IGFBP-2 heparin binding domain-containing peptide sequence
KKHVGINNPRK

SEQ ID NO: 3789 - protein, 11 aa, Artificial
  IGFBP-2 heparin binding domain-containing peptide sequence
RKHVGINNPRK

SEQ ID NO: 3790 - protein, 11 aa, Artificial
  IGFBP-2 heparin binding domain-containing peptide sequence
HKHVGINNPRK

SEQ ID NO: 3791 - protein, 11 aa, Artificial
  IGFBP-2 heparin binding domain-containing peptide sequence
KRHVGINNPRK

SEQ ID NO: 3792 - protein, 11 aa, Artificial
  IGFBP-2 heparin binding domain-containing peptide sequence
RRHVGINNPRK

SEQ ID NO: 3793 - protein, 11 aa, Artificial
  IGFBP-2 heparin binding domain-containing peptide sequence
HRHVGINNPRK

SEQ ID NO: 3794 - protein, 11 aa, Artificial
  IGFBP-2 heparin binding domain-containing peptide sequence
KHKVGINNPRK

SEQ ID NO: 3795 - protein, 11 aa, Artificial
  IGFBP-2 heparin binding domain-containing peptide sequence
RHKVGINNPRK

SEQ ID NO: 3796 - protein, 11 aa, Artificial
  IGFBP-2 heparin binding domain-containing peptide sequence
HHKVGINNPRK

SEQ ID NO: 3797 - protein, 11 aa, Artificial
  IGFBP-2 heparin binding domain-containing peptide sequence
KKKVGINNPRK

SEQ ID NO: 3798 - protein, 11 aa, Artificial
  IGFBP-2 heparin binding domain-containing peptide sequence
RKKVGINNPRK

SEQ ID NO: 3799 - protein, 11 aa, Artificial
  IGFBP-2 heparin binding domain-containing peptide sequence
HKKVGINNPRK

SEQ ID NO: 3800 - protein, 11 aa, Artificial
  IGFBP-2 heparin binding domain-containing peptide sequence
KRKVGINNPRK

SEQ ID NO: 3801 - protein, 11 aa, Artificial
  IGFBP-2 heparin binding domain-containing peptide sequence
RRKVGINNPRK

SEQ ID NO: 3802 - protein, 11 aa, Artificial
  IGFBP-2 heparin binding domain-containing peptide sequence
HRKVGINNPRK

SEQ ID NO: 3803 - protein, 11 aa, Artificial
  IGFBP-2 heparin binding domain-containing peptide sequence
KHRVGINNPRK

SEQ ID NO: 3804 - protein, 11 aa, Artificial
  IGFBP-2 heparin binding domain-containing peptide sequence
RHRVGINNPRK

SEQ ID NO: 3805 - protein, 11 aa, Artificial
  IGFBP-2 heparin binding domain-containing peptide sequence
HHRVGINNPRK

SEQ ID NO: 3806 - protein, 11 aa, Artificial
  IGFBP-2 heparin binding domain-containing peptide sequence
KKRVGINNPRK

SEQ ID NO: 3807 - protein, 11 aa, Artificial
  IGFBP-2 heparin binding domain-containing peptide sequence
RKRVGINNPRK

SEQ ID NO: 3808 - protein, 11 aa, Artificial
  IGFBP-2 heparin binding domain-containing peptide sequence
HKRVGINNPRK

SEQ ID NO: 3809 - protein, 11 aa, Artificial
  IGFBP-2 heparin binding domain-containing peptide sequence
KRRVGINNPRK

SEQ ID NO: 3810 - protein, 11 aa, Artificial
  IGFBP-2 heparin binding domain-containing peptide sequence
RRRVGINNPRK

SEQ ID NO: 3811 - protein, 11 aa, Artificial
  IGFBP-2 heparin binding domain-containing peptide sequence
HRRVGINNPRK

SEQ ID NO: 3812 - protein, 11 aa, Artificial
  IGFBP-2 heparin binding domain-containing peptide sequence
KHHLGVNNPRK

SEQ ID NO: 3813 - protein, 11 aa, Artificial
  IGFBP-2 heparin binding domain-containing peptide sequence
RHHLGVNNPRK

SEQ ID NO: 3814 - protein, 11 aa, Artificial
  IGFBP-2 heparin binding domain-containing peptide sequence
HHHLGVNNPRK

SEQ ID NO: 3815 - protein, 11 aa, Artificial
  IGFBP-2 heparin binding domain-containing peptide sequence
KKHLGVNNPRK

SEQ ID NO: 3816 - protein, 11 aa, Artificial
  IGFBP-2 heparin binding domain-containing peptide sequence
RKHLGVNNPRK

SEQ ID NO: 3817 - protein, 11 aa, Artificial
  IGFBP-2 heparin binding domain-containing peptide sequence
HKHLGVNNPRK

SEQ ID NO: 3818 - protein, 11 aa, Artificial
  IGFBP-2 heparin binding domain-containing peptide sequence
KRHLGVNNPRK

SEQ ID NO: 3819 - protein, 11 aa, Artificial
  IGFBP-2 heparin binding domain-containing peptide sequence
RRHLGVNNPRK

SEQ ID NO: 3820 - protein, 11 aa, Artificial
  IGFBP-2 heparin binding domain-containing peptide sequence
HRHLGVNNPRK

SEQ ID NO: 3821 - protein, 11 aa, Artificial
  IGFBP-2 heparin binding domain-containing peptide sequence
KHKLGVNNPRK

SEQ ID NO: 3822 - protein, 11 aa, Artificial
  IGFBP-2 heparin binding domain-containing peptide sequence
RHKLGVNNPRK

SEQ ID NO: 3823 - protein, 11 aa, Artificial
  IGFBP-2 heparin binding domain-containing peptide sequence
HHKLGVNNPRK

SEQ ID NO: 3824 - protein, 11 aa, Artificial
  IGFBP-2 heparin binding domain-containing peptide sequence
KKKLGVNNPRK

SEQ ID NO: 3825 - protein, 11 aa, Artificial
  IGFBP-2 heparin binding domain-containing peptide sequence
RKKLGVNNPRK

SEQ ID NO: 3826 - protein, 11 aa, Artificial
  IGFBP-2 heparin binding domain-containing peptide sequence
HKKLGVNNPRK

SEQ ID NO: 3827 - protein, 11 aa, Artificial
  IGFBP-2 heparin binding domain-containing peptide sequence
KRKLGVNNPRK

SEQ ID NO: 3828 - protein, 11 aa, Artificial
  IGFBP-2 heparin binding domain-containing peptide sequence
RRKLGVNNPRK

SEQ ID NO: 3829 - protein, 11 aa, Artificial
  IGFBP-2 heparin binding domain-containing peptide sequence
HRKLGVNNPRK

SEQ ID NO: 3830 - protein, 11 aa, Artificial
  IGFBP-2 heparin binding domain-containing peptide sequence
KHRLGVNNPRK

SEQ ID NO: 3831 - protein, 11 aa, Artificial
  IGFBP-2 heparin binding domain-containing peptide sequence
RHRLGVNNPRK

SEQ ID NO: 3832 - protein, 11 aa, Artificial
  IGFBP-2 heparin binding domain-containing peptide sequence
HHRLGVNNPRK

SEQ ID NO: 3833 - protein, 11 aa, Artificial
  IGFBP-2 heparin binding domain-containing peptide sequence
KKRLGVNNPRK

SEQ ID NO: 3834 - protein, 11 aa, Artificial
  IGFBP-2 heparin binding domain-containing peptide sequence
RKRLGVNNPRK

SEQ ID NO: 3835 - protein, 11 aa, Artificial
  IGFBP-2 heparin binding domain-containing peptide sequence
HKRLGVNNPRK

SEQ ID NO: 3836 - protein, 11 aa, Artificial
  IGFBP-2 heparin binding domain-containing peptide sequence
KRRLGVNNPRK

SEQ ID NO: 3837 - protein, 11 aa, Artificial
  IGFBP-2 heparin binding domain-containing peptide sequence
RRRLGVNNPRK

SEQ ID NO: 3838 - protein, 11 aa, Artificial
  IGFBP-2 heparin binding domain-containing peptide sequence
HRRLGVNNPRK

SEQ ID NO: 3839 - protein, 11 aa, Artificial
  IGFBP-2 heparin binding domain-containing peptide sequence
KHHIGVNNPRK

SEQ ID NO: 3840 - protein, 11 aa, Artificial
  IGFBP-2 heparin binding domain-containing peptide sequence
RHHIGVNNPRK

SEQ ID NO: 3841 - protein, 11 aa, Artificial
  IGFBP-2 heparin binding domain-containing peptide sequence
HHHIGVNNPRK

SEQ ID NO: 3842 - protein, 11 aa, Artificial
  IGFBP-2 heparin binding domain-containing peptide sequence
KKHIGVNNPRK

SEQ ID NO: 3843 - protein, 11 aa, Artificial
  IGFBP-2 heparin binding domain-containing peptide sequence
RKHIGVNNPRK

SEQ ID NO: 3844 - protein, 11 aa, Artificial
  IGFBP-2 heparin binding domain-containing peptide sequence
HKHIGVNNPRK

SEQ ID NO: 3845 - protein, 11 aa, Artificial
  IGFBP-2 heparin binding domain-containing peptide sequence
KRHIGVNNPRK

SEQ ID NO: 3846 - protein, 11 aa, Artificial
  IGFBP-2 heparin binding domain-containing peptide sequence
RRHIGVNNPRK

SEQ ID NO: 3847 - protein, 11 aa, Artificial
  IGFBP-2 heparin binding domain-containing peptide sequence
HRHIGVNNPRK

SEQ ID NO: 3848 - protein, 11 aa, Artificial
  IGFBP-2 heparin binding domain-containing peptide sequence
KHKIGVNNPRK

SEQ ID NO: 3849 - protein, 11 aa, Artificial
  IGFBP-2 heparin binding domain-containing peptide sequence
RHKIGVNNPRK

SEQ ID NO: 3850 - protein, 11 aa, Artificial
  IGFBP-2 heparin binding domain-containing peptide sequence
HHKIGVNNPRK

SEQ ID NO: 3851 - protein, 11 aa, Artificial
  IGFBP-2 heparin binding domain-containing peptide sequence
KKKIGVNNPRK

SEQ ID NO: 3852 - protein, 11 aa, Artificial
  IGFBP-2 heparin binding domain-containing peptide sequence
RKKIGVNNPRK

SEQ ID NO: 3853 - protein, 11 aa, Artificial
  IGFBP-2 heparin binding domain-containing peptide sequence
HKKIGVNNPRK

SEQ ID NO: 3854 - protein, 11 aa, Artificial
  IGFBP-2 heparin binding domain-containing peptide sequence
KRKIGVNNPRK

SEQ ID NO: 3855 - protein, 11 aa, Artificial
  IGFBP-2 heparin binding domain-containing peptide sequence
RRKIGVNNPRK

SEQ ID NO: 3856 - protein, 11 aa, Artificial
  IGFBP-2 heparin binding domain-containing peptide sequence
HRKIGVNNPRK

SEQ ID NO: 3857 - protein, 11 aa, Artificial
  IGFBP-2 heparin binding domain-containing peptide sequence
KHRIGVNNPRK

SEQ ID NO: 3858 - protein, 11 aa, Artificial
  IGFBP-2 heparin binding domain-containing peptide sequence
RHRIGVNNPRK

SEQ ID NO: 3859 - protein, 11 aa, Artificial
  IGFBP-2 heparin binding domain-containing peptide sequence
HHRIGVNNPRK

SEQ ID NO: 3860 - protein, 11 aa, Artificial
  IGFBP-2 heparin binding domain-containing peptide sequence
KKRIGVNNPRK

SEQ ID NO: 3861 - protein, 11 aa, Artificial
  IGFBP-2 heparin binding domain-containing peptide sequence
RKRIGVNNPRK

SEQ ID NO: 3862 - protein, 11 aa, Artificial
  IGFBP-2 heparin binding domain-containing peptide sequence
HKRIGVNNPRK

SEQ ID NO: 3863 - protein, 11 aa, Artificial
  IGFBP-2 heparin binding domain-containing peptide sequence
KRRIGVNNPRK

SEQ ID NO: 3864 - protein, 11 aa, Artificial
  IGFBP-2 heparin binding domain-containing peptide sequence
RRRIGVNNPRK

SEQ ID NO: 3865 - protein, 11 aa, Artificial
  IGFBP-2 heparin binding domain-containing peptide sequence
HRRIGVNNPRK

SEQ ID NO: 3866 - protein, 11 aa, Artificial
  IGFBP-2 heparin binding domain-containing peptide sequence
KHHVGVNNPRK

SEQ ID NO: 3867 - protein, 11 aa, Artificial
  IGFBP-2 heparin binding domain-containing peptide sequence
RHHVGVNNPRK

SEQ ID NO: 3868 - protein, 11 aa, Artificial
  IGFBP-2 heparin binding domain-containing peptide sequence
HHHVGVNNPRK

SEQ ID NO: 3869 - protein, 11 aa, Artificial
  IGFBP-2 heparin binding domain-containing peptide sequence
KKHVGVNNPRK

SEQ ID NO: 3870 - protein, 11 aa, Artificial
  IGFBP-2 heparin binding domain-containing peptide sequence
RKHVGVNNPRK

SEQ ID NO: 3871 - protein, 11 aa, Artificial
  IGFBP-2 heparin binding domain-containing peptide sequence
HKHVGVNNPRK

SEQ ID NO: 3872 - protein, 11 aa, Artificial
  IGFBP-2 heparin binding domain-containing peptide sequence
KRHVGVNNPRK

SEQ ID NO: 3873 - protein, 11 aa, Artificial
  IGFBP-2 heparin binding domain-containing peptide sequence
RRHVGVNNPRK

SEQ ID NO: 3874 - protein, 11 aa, Artificial
  IGFBP-2 heparin binding domain-containing peptide sequence
HRHVGVNNPRK

SEQ ID NO: 3875 - protein, 11 aa, Artificial
  IGFBP-2 heparin binding domain-containing peptide sequence
KHKVGVNNPRK

SEQ ID NO: 3876 - protein, 11 aa, Artificial
  IGFBP-2 heparin binding domain-containing peptide sequence
RHKVGVNNPRK

SEQ ID NO: 3877 - protein, 11 aa, Artificial
  IGFBP-2 heparin binding domain-containing peptide sequence
HHKVGVNNPRK

SEQ ID NO: 3878 - protein, 11 aa, Artificial
  IGFBP-2 heparin binding domain-containing peptide sequence
KKKVGVNNPRK

SEQ ID NO: 3879 - protein, 11 aa, Artificial
  IGFBP-2 heparin binding domain-containing peptide sequence
RKKVGVNNPRK

SEQ ID NO: 3880 - protein, 11 aa, Artificial
  IGFBP-2 heparin binding domain-containing peptide sequence
HKKVGVNNPRK

SEQ ID NO: 3881 - protein, 11 aa, Artificial
  IGFBP-2 heparin binding domain-containing peptide sequence
KRKVGVNNPRK

SEQ ID NO: 3882 - protein, 11 aa, Artificial
  IGFBP-2 heparin binding domain-containing peptide sequence
RRKVGVNNPRK

SEQ ID NO: 3883 - protein, 11 aa, Artificial
  IGFBP-2 heparin binding domain-containing peptide sequence
HRKVGVNNPRK

SEQ ID NO: 3884 - protein, 11 aa, Artificial
  IGFBP-2 heparin binding domain-containing peptide sequence
KHRVGVNNPRK

SEQ ID NO: 3885 - protein, 11 aa, Artificial
  IGFBP-2 heparin binding domain-containing peptide sequence
RHRVGVNNPRK

SEQ ID NO: 3886 - protein, 11 aa, Artificial
  IGFBP-2 heparin binding domain-containing peptide sequence
HHRVGVNNPRK

SEQ ID NO: 3887 - protein, 11 aa, Artificial
  IGFBP-2 heparin binding domain-containing peptide sequence
KKRVGVNNPRK

SEQ ID NO: 3888 - protein, 11 aa, Artificial
  IGFBP-2 heparin binding domain-containing peptide sequence
RKRVGVNNPRK

SEQ ID NO: 3889 - protein, 11 aa, Artificial
  IGFBP-2 heparin binding domain-containing peptide sequence
HKRVGVNNPRK

SEQ ID NO: 3890 - protein, 11 aa, Artificial
  IGFBP-2 heparin binding domain-containing peptide sequence
KRRVGVNNPRK

SEQ ID NO: 3891 - protein, 11 aa, Artificial
  IGFBP-2 heparin binding domain-containing peptide sequence
RRRVGVNNPRK

SEQ ID NO: 3892 - protein, 11 aa, Artificial
  IGFBP-2 heparin binding domain-containing peptide sequence
HRRVGVNNPRK

SEQ ID NO: 3893 - protein, 11 aa, Artificial
  IGFBP-2 heparin binding domain-containing peptide sequence
KHHLGLEEPHK

SEQ ID NO: 3894 - protein, 11 aa, Artificial
  IGFBP-2 heparin binding domain-containing peptide sequence
RHHLGLEEPHK

SEQ ID NO: 3895 - protein, 11 aa, Artificial
  IGFBP-2 heparin binding domain-containing peptide sequence
HHHLGLEEPHK

SEQ ID NO: 3896 - protein, 11 aa, Artificial
  IGFBP-2 heparin binding domain-containing peptide sequence
KKHLGLEEPHK

SEQ ID NO: 3897 - protein, 11 aa, Artificial
  IGFBP-2 heparin binding domain-containing peptide sequence
RKHLGLEEPHK

SEQ ID NO: 3898 - protein, 11 aa, Artificial
  IGFBP-2 heparin binding domain-containing peptide sequence
HKHLGLEEPHK

SEQ ID NO: 3899 - protein, 11 aa, Artificial
  IGFBP-2 heparin binding domain-containing peptide sequence
KRHLGLEEPHK

SEQ ID NO: 3900 - protein, 11 aa, Artificial
  IGFBP-2 heparin binding domain-containing peptide sequence
RRHLGLEEPHK

SEQ ID NO: 3901 - protein, 11 aa, Artificial
  IGFBP-2 heparin binding domain-containing peptide sequence
HRHLGLEEPHK

SEQ ID NO: 3902 - protein, 11 aa, Artificial
  IGFBP-2 heparin binding domain-containing peptide sequence
KHKLGLEEPHK

SEQ ID NO: 3903 - protein, 11 aa, Artificial
  IGFBP-2 heparin binding domain-containing peptide sequence
RHKLGLEEPHK

SEQ ID NO: 3904 - protein, 11 aa, Artificial
  IGFBP-2 heparin binding domain-containing peptide sequence
HHKLGLEEPHK

SEQ ID NO: 3905 - protein, 11 aa, Artificial
  IGFBP-2 heparin binding domain-containing peptide sequence
KKKLGLEEPHK

SEQ ID NO: 3906 - protein, 11 aa, Artificial
  IGFBP-2 heparin binding domain-containing peptide sequence
RKKLGLEEPHK

SEQ ID NO: 3907 - protein, 11 aa, Artificial
  IGFBP-2 heparin binding domain-containing peptide sequence
HKKLGLEEPHK

SEQ ID NO: 3908 - protein, 11 aa, Artificial
  IGFBP-2 heparin binding domain-containing peptide sequence
KRKLGLEEPHK

SEQ ID NO: 3909 - protein, 11 aa, Artificial
  IGFBP-2 heparin binding domain-containing peptide sequence
RRKLGLEEPHK

SEQ ID NO: 3910 - protein, 11 aa, Artificial
  IGFBP-2 heparin binding domain-containing peptide sequence
HRKLGLEEPHK

SEQ ID NO: 3911 - protein, 11 aa, Artificial
  IGFBP-2 heparin binding domain-containing peptide sequence
KHRLGLEEPHK

SEQ ID NO: 3912 - protein, 11 aa, Artificial
  IGFBP-2 heparin binding domain-containing peptide sequence
RHRLGLEEPHK

SEQ ID NO: 3913 - protein, 11 aa, Artificial
  IGFBP-2 heparin binding domain-containing peptide sequence
HHRLGLEEPHK

SEQ ID NO: 3914 - protein, 11 aa, Artificial
  IGFBP-2 heparin binding domain-containing peptide sequence
KKRLGLEEPHK

SEQ ID NO: 3915 - protein, 11 aa, Artificial
  IGFBP-2 heparin binding domain-containing peptide sequence
RKRLGLEEPHK

SEQ ID NO: 3916 - protein, 11 aa, Artificial
  IGFBP-2 heparin binding domain-containing peptide sequence
HKRLGLEEPHK

SEQ ID NO: 3917 - protein, 11 aa, Artificial
  IGFBP-2 heparin binding domain-containing peptide sequence
KRRLGLEEPHK

SEQ ID NO: 3918 - protein, 11 aa, Artificial
  IGFBP-2 heparin binding domain-containing peptide sequence
RRRLGLEEPHK

SEQ ID NO: 3919 - protein, 11 aa, Artificial
  IGFBP-2 heparin binding domain-containing peptide sequence
HRRLGLEEPHK

SEQ ID NO: 3920 - protein, 11 aa, Artificial
  IGFBP-2 heparin binding domain-containing peptide sequence
KHHIGLEEPHK

SEQ ID NO: 3921 - protein, 11 aa, Artificial
  IGFBP-2 heparin binding domain-containing peptide sequence
RHHIGLEEPHK

SEQ ID NO: 3922 - protein, 11 aa, Artificial
  IGFBP-2 heparin binding domain-containing peptide sequence
HHHIGLEEPHK

SEQ ID NO: 3923 - protein, 11 aa, Artificial
  IGFBP-2 heparin binding domain-containing peptide sequence
KKHIGLEEPHK

SEQ ID NO: 3924 - protein, 11 aa, Artificial
  IGFBP-2 heparin binding domain-containing peptide sequence
RKHIGLEEPHK

SEQ ID NO: 3925 - protein, 11 aa, Artificial
  IGFBP-2 heparin binding domain-containing peptide sequence
HKHIGLEEPHK

SEQ ID NO: 3926 - protein, 11 aa, Artificial
  IGFBP-2 heparin binding domain-containing peptide sequence
KRHIGLEEPHK

SEQ ID NO: 3927 - protein, 11 aa, Artificial
  IGFBP-2 heparin binding domain-containing peptide sequence
RRHIGLEEPHK

SEQ ID NO: 3928 - protein, 11 aa, Artificial
  IGFBP-2 heparin binding domain-containing peptide sequence
HRHIGLEEPHK

SEQ ID NO: 3929 - protein, 11 aa, Artificial
  IGFBP-2 heparin binding domain-containing peptide sequence
KHKIGLEEPHK

SEQ ID NO: 3930 - protein, 11 aa, Artificial
  IGFBP-2 heparin binding domain-containing peptide sequence
RHKIGLEEPHK

SEQ ID NO: 3931 - protein, 11 aa, Artificial
  IGFBP-2 heparin binding domain-containing peptide sequence
HHKIGLEEPHK

SEQ ID NO: 3932 - protein, 11 aa, Artificial
  IGFBP-2 heparin binding domain-containing peptide sequence
KKKIGLEEPHK

SEQ ID NO: 3933 - protein, 11 aa, Artificial
  IGFBP-2 heparin binding domain-containing peptide sequence
RKKIGLEEPHK

SEQ ID NO: 3934 - protein, 11 aa, Artificial
  IGFBP-2 heparin binding domain-containing peptide sequence
HKKIGLEEPHK

SEQ ID NO: 3935 - protein, 11 aa, Artificial
  IGFBP-2 heparin binding domain-containing peptide sequence
KRKIGLEEPHK

SEQ ID NO: 3936 - protein, 11 aa, Artificial
  IGFBP-2 heparin binding domain-containing peptide sequence
RRKIGLEEPHK

SEQ ID NO: 3937 - protein, 11 aa, Artificial
  IGFBP-2 heparin binding domain-containing peptide sequence
HRKIGLEEPHK

SEQ ID NO: 3938 - protein, 11 aa, Artificial
  IGFBP-2 heparin binding domain-containing peptide sequence
KHRIGLEEPHK

SEQ ID NO: 3939 - protein, 11 aa, Artificial
  IGFBP-2 heparin binding domain-containing peptide sequence
RHRIGLEEPHK

SEQ ID NO: 3940 - protein, 11 aa, Artificial
  IGFBP-2 heparin binding domain-containing peptide sequence
HHRIGLEEPHK

SEQ ID NO: 3941 - protein, 11 aa, Artificial
  IGFBP-2 heparin binding domain-containing peptide sequence
KKRIGLEEPHK

SEQ ID NO: 3942 - protein, 11 aa, Artificial
  IGFBP-2 heparin binding domain-containing peptide sequence
RKRIGLEEPHK

SEQ ID NO: 3943 - protein, 11 aa, Artificial
  IGFBP-2 heparin binding domain-containing peptide sequence
HKRIGLEEPHK

SEQ ID NO: 3944 - protein, 11 aa, Artificial
  IGFBP-2 heparin binding domain-containing peptide sequence
KRRIGLEEPHK

SEQ ID NO: 3945 - protein, 11 aa, Artificial
  IGFBP-2 heparin binding domain-containing peptide sequence
RRRIGLEEPHK

SEQ ID NO: 3946 - protein, 11 aa, Artificial
  IGFBP-2 heparin binding domain-containing peptide sequence
HRRIGLEEPHK

SEQ ID NO: 3947 - protein, 11 aa, Artificial
  IGFBP-2 heparin binding domain-containing peptide sequence
KHHVGLEEPHK

SEQ ID NO: 3948 - protein, 11 aa, Artificial
  IGFBP-2 heparin binding domain-containing peptide sequence
RHHVGLEEPHK

SEQ ID NO: 3949 - protein, 11 aa, Artificial
  IGFBP-2 heparin binding domain-containing peptide sequence
HHHVGLEEPHK

SEQ ID NO: 3950 - protein, 11 aa, Artificial
  IGFBP-2 heparin binding domain-containing peptide sequence
KKHVGLEEPHK

SEQ ID NO: 3951 - protein, 11 aa, Artificial
  IGFBP-2 heparin binding domain-containing peptide sequence
RKHVGLEEPHK

SEQ ID NO: 3952 - protein, 11 aa, Artificial
  IGFBP-2 heparin binding domain-containing peptide sequence
HKHVGLEEPHK

SEQ ID NO: 3953 - protein, 11 aa, Artificial
  IGFBP-2 heparin binding domain-containing peptide sequence
KRHVGLEEPHK

SEQ ID NO: 3954 - protein, 11 aa, Artificial
  IGFBP-2 heparin binding domain-containing peptide sequence
RRHVGLEEPHK

SEQ ID NO: 3955 - protein, 11 aa, Artificial
  IGFBP-2 heparin binding domain-containing peptide sequence
HRHVGLEEPHK

SEQ ID NO: 3956 - protein, 11 aa, Artificial
  IGFBP-2 heparin binding domain-containing peptide sequence
KHKVGLEEPHK

SEQ ID NO: 3957 - protein, 11 aa, Artificial
  IGFBP-2 heparin binding domain-containing peptide sequence
RHKVGLEEPHK

SEQ ID NO: 3958 - protein, 11 aa, Artificial
  IGFBP-2 heparin binding domain-containing peptide sequence
HHKVGLEEPHK

SEQ ID NO: 3959 - protein, 11 aa, Artificial
  IGFBP-2 heparin binding domain-containing peptide sequence
KKKVGLEEPHK

SEQ ID NO: 3960 - protein, 11 aa, Artificial
  IGFBP-2 heparin binding domain-containing peptide sequence
RKKVGLEEPHK

SEQ ID NO: 3961 - protein, 11 aa, Artificial
  IGFBP-2 heparin binding domain-containing peptide sequence
HKKVGLEEPHK

SEQ ID NO: 3962 - protein, 11 aa, Artificial
  IGFBP-2 heparin binding domain-containing peptide sequence
KRKVGLEEPHK

SEQ ID NO: 3963 - protein, 11 aa, Artificial
  IGFBP-2 heparin binding domain-containing peptide sequence
RRKVGLEEPHK

SEQ ID NO: 3964 - protein, 11 aa, Artificial
  IGFBP-2 heparin binding domain-containing peptide sequence
HRKVGLEEPHK

SEQ ID NO: 3965 - protein, 11 aa, Artificial
  IGFBP-2 heparin binding domain-containing peptide sequence
KHRVGLEEPHK

SEQ ID NO: 3966 - protein, 11 aa, Artificial
  IGFBP-2 heparin binding domain-containing peptide sequence
RHRVGLEEPHK

SEQ ID NO: 3967 - protein, 11 aa, Artificial
  IGFBP-2 heparin binding domain-containing peptide sequence
HHRVGLEEPHK

SEQ ID NO: 3968 - protein, 11 aa, Artificial
  IGFBP-2 heparin binding domain-containing peptide sequence
KKRVGLEEPHK

SEQ ID NO: 3969 - protein, 11 aa, Artificial
  IGFBP-2 heparin binding domain-containing peptide sequence
RKRVGLEEPHK

SEQ ID NO: 3970 - protein, 11 aa, Artificial
  IGFBP-2 heparin binding domain-containing peptide sequence
HKRVGLEEPHK

SEQ ID NO: 3971 - protein, 11 aa, Artificial
  IGFBP-2 heparin binding domain-containing peptide sequence
KRRVGLEEPHK

SEQ ID NO: 3972 - protein, 11 aa, Artificial
  IGFBP-2 heparin binding domain-containing peptide sequence
RRRVGLEEPHK

SEQ ID NO: 3973 - protein, 11 aa, Artificial
  IGFBP-2 heparin binding domain-containing peptide sequence
HRRVGLEEPHK

SEQ ID NO: 3974 - protein, 11 aa, Artificial
  IGFBP-2 heparin binding domain-containing peptide sequence
KHHLGIEEPHK

SEQ ID NO: 3975 - protein, 11 aa, Artificial
  IGFBP-2 heparin binding domain-containing peptide sequence
RHHLGIEEPHK

SEQ ID NO: 3976 - protein, 11 aa, Artificial
  IGFBP-2 heparin binding domain-containing peptide sequence
HHHLGIEEPHK

SEQ ID NO: 3977 - protein, 11 aa, Artificial
  IGFBP-2 heparin binding domain-containing peptide sequence
KKHLGIEEPHK

SEQ ID NO: 3978 - protein, 11 aa, Artificial
  IGFBP-2 heparin binding domain-containing peptide sequence
RKHLGIEEPHK

SEQ ID NO: 3979 - protein, 11 aa, Artificial
  IGFBP-2 heparin binding domain-containing peptide sequence
HKHLGIEEPHK

SEQ ID NO: 3980 - protein, 11 aa, Artificial
  IGFBP-2 heparin binding domain-containing peptide sequence
KRHLGIEEPHK

SEQ ID NO: 3981 - protein, 11 aa, Artificial
  IGFBP-2 heparin binding domain-containing peptide sequence
RRHLGIEEPHK

SEQ ID NO: 3982 - protein, 11 aa, Artificial
  IGFBP-2 heparin binding domain-containing peptide sequence
HRHLGIEEPHK

SEQ ID NO: 3983 - protein, 11 aa, Artificial
  IGFBP-2 heparin binding domain-containing peptide sequence
KHKLGIEEPHK

SEQ ID NO: 3984 - protein, 11 aa, Artificial
  IGFBP-2 heparin binding domain-containing peptide sequence
RHKLGIEEPHK

SEQ ID NO: 3985 - protein, 11 aa, Artificial
  IGFBP-2 heparin binding domain-containing peptide sequence
HHKLGIEEPHK

SEQ ID NO: 3986 - protein, 11 aa, Artificial
  IGFBP-2 heparin binding domain-containing peptide sequence
KKKLGIEEPHK

SEQ ID NO: 3987 - protein, 11 aa, Artificial
  IGFBP-2 heparin binding domain-containing peptide sequence
RKKLGIEEPHK

SEQ ID NO: 3988 - protein, 11 aa, Artificial
  IGFBP-2 heparin binding domain-containing peptide sequence
HKKLGIEEPHK

SEQ ID NO: 3989 - protein, 11 aa, Artificial
  IGFBP-2 heparin binding domain-containing peptide sequence
KRKLGIEEPHK

SEQ ID NO: 3990 - protein, 11 aa, Artificial
  IGFBP-2 heparin binding domain-containing peptide sequence
RRKLGIEEPHK

SEQ ID NO: 3991 - protein, 11 aa, Artificial
  IGFBP-2 heparin binding domain-containing peptide sequence
HRKLGIEEPHK

SEQ ID NO: 3992 - protein, 11 aa, Artificial
  IGFBP-2 heparin binding domain-containing peptide sequence
KHRLGIEEPHK

SEQ ID NO: 3993 - protein, 11 aa, Artificial
  IGFBP-2 heparin binding domain-containing peptide sequence
RHRLGIEEPHK

SEQ ID NO: 3994 - protein, 11 aa, Artificial
  IGFBP-2 heparin binding domain-containing peptide sequence
HHRLGIEEPHK

SEQ ID NO: 3995 - protein, 11 aa, Artificial
  IGFBP-2 heparin binding domain-containing peptide sequence
KKRLGIEEPHK

SEQ ID NO: 3996 - protein, 11 aa, Artificial
  IGFBP-2 heparin binding domain-containing peptide sequence
RKRLGIEEPHK

SEQ ID NO: 3997 - protein, 11 aa, Artificial
  IGFBP-2 heparin binding domain-containing peptide sequence
HKRLGIEEPHK

SEQ ID NO: 3998 - protein, 11 aa, Artificial
  IGFBP-2 heparin binding domain-containing peptide sequence
KRRLGIEEPHK

SEQ ID NO: 3999 - protein, 11 aa, Artificial
  IGFBP-2 heparin binding domain-containing peptide sequence
RRRLGIEEPHK

SEQ ID NO: 4000 - protein, 11 aa, Artificial
  IGFBP-2 heparin binding domain-containing peptide sequence
HRRLGIEEPHK

SEQ ID NO: 4001 - protein, 11 aa, Artificial
  IGFBP-2 heparin binding domain-containing peptide sequence
KHHIGIEEPHK

SEQ ID NO: 4002 - protein, 11 aa, Artificial
  IGFBP-2 heparin binding domain-containing peptide sequence
RHHIGIEEPHK

SEQ ID NO: 4003 - protein, 11 aa, Artificial
  IGFBP-2 heparin binding domain-containing peptide sequence
HHHIGIEEPHK

SEQ ID NO: 4004 - protein, 11 aa, Artificial
  IGFBP-2 heparin binding domain-containing peptide sequence
KKHIGIEEPHK

SEQ ID NO: 4005 - protein, 11 aa, Artificial
  IGFBP-2 heparin binding domain-containing peptide sequence
RKHIGIEEPHK

SEQ ID NO: 4006 - protein, 11 aa, Artificial
  IGFBP-2 heparin binding domain-containing peptide sequence
HKHIGIEEPHK

SEQ ID NO: 4007 - protein, 11 aa, Artificial
  IGFBP-2 heparin binding domain-containing peptide sequence
KRHIGIEEPHK

SEQ ID NO: 4008 - protein, 11 aa, Artificial
  IGFBP-2 heparin binding domain-containing peptide sequence
RRHIGIEEPHK

SEQ ID NO: 4009 - protein, 11 aa, Artificial
  IGFBP-2 heparin binding domain-containing peptide sequence
HRHIGIEEPHK

SEQ ID NO: 4010 - protein, 11 aa, Artificial
  IGFBP-2 heparin binding domain-containing peptide sequence
KHKIGIEEPHK

SEQ ID NO: 4011 - protein, 11 aa, Artificial
  IGFBP-2 heparin binding domain-containing peptide sequence
RHKIGIEEPHK

SEQ ID NO: 4012 - protein, 11 aa, Artificial
  IGFBP-2 heparin binding domain-containing peptide sequence
HHKIGIEEPHK

SEQ ID NO: 4013 - protein, 11 aa, Artificial
  IGFBP-2 heparin binding domain-containing peptide sequence
KKKIGIEEPHK

SEQ ID NO: 4014 - protein, 11 aa, Artificial
  IGFBP-2 heparin binding domain-containing peptide sequence
RKKIGIEEPHK

SEQ ID NO: 4015 - protein, 11 aa, Artificial
  IGFBP-2 heparin binding domain-containing peptide sequence
HKKIGIEEPHK

SEQ ID NO: 4016 - protein, 11 aa, Artificial
  IGFBP-2 heparin binding domain-containing peptide sequence
KRKIGIEEPHK

SEQ ID NO: 4017 - protein, 11 aa, Artificial
  IGFBP-2 heparin binding domain-containing peptide sequence
RRKIGIEEPHK

SEQ ID NO: 4018 - protein, 11 aa, Artificial
  IGFBP-2 heparin binding domain-containing peptide sequence
HRKIGIEEPHK

SEQ ID NO: 4019 - protein, 11 aa, Artificial
  IGFBP-2 heparin binding domain-containing peptide sequence
KHRIGIEEPHK

SEQ ID NO: 4020 - protein, 11 aa, Artificial
  IGFBP-2 heparin binding domain-containing peptide sequence
RHRIGIEEPHK

SEQ ID NO: 4021 - protein, 11 aa, Artificial
  IGFBP-2 heparin binding domain-containing peptide sequence
HHRIGIEEPHK

SEQ ID NO: 4022 - protein, 11 aa, Artificial
  IGFBP-2 heparin binding domain-containing peptide sequence
KKRIGIEEPHK

SEQ ID NO: 4023 - protein, 11 aa, Artificial
  IGFBP-2 heparin binding domain-containing peptide sequence
RKRIGIEEPHK

SEQ ID NO: 4024 - protein, 11 aa, Artificial
  IGFBP-2 heparin binding domain-containing peptide sequence
HKRIGIEEPHK

SEQ ID NO: 4025 - protein, 11 aa, Artificial
  IGFBP-2 heparin binding domain-containing peptide sequence
KRRIGIEEPHK

SEQ ID NO: 4026 - protein, 11 aa, Artificial
  IGFBP-2 heparin binding domain-containing peptide sequence
RRRIGIEEPHK

SEQ ID NO: 4027 - protein, 11 aa, Artificial
  IGFBP-2 heparin binding domain-containing peptide sequence
HRRIGIEEPHK

SEQ ID NO: 4028 - protein, 11 aa, Artificial
  IGFBP-2 heparin binding domain-containing peptide sequence
KHHVGIEEPHK

SEQ ID NO: 4029 - protein, 11 aa, Artificial
  IGFBP-2 heparin binding domain-containing peptide sequence
RHHVGIEEPHK

SEQ ID NO: 4030 - protein, 11 aa, Artificial
  IGFBP-2 heparin binding domain-containing peptide sequence
HHHVGIEEPHK

SEQ ID NO: 4031 - protein, 11 aa, Artificial
  IGFBP-2 heparin binding domain-containing peptide sequence
KKHVGIEEPHK

SEQ ID NO: 4032 - protein, 11 aa, Artificial
  IGFBP-2 heparin binding domain-containing peptide sequence
RKHVGIEEPHK

SEQ ID NO: 4033 - protein, 11 aa, Artificial
  IGFBP-2 heparin binding domain-containing peptide sequence
HKHVGIEEPHK

SEQ ID NO: 4034 - protein, 11 aa, Artificial
  IGFBP-2 heparin binding domain-containing peptide sequence
KRHVGIEEPHK

SEQ ID NO: 4035 - protein, 11 aa, Artificial
  IGFBP-2 heparin binding domain-containing peptide sequence
RRHVGIEEPHK

SEQ ID NO: 4036 - protein, 11 aa, Artificial
  IGFBP-2 heparin binding domain-containing peptide sequence
HRHVGIEEPHK

SEQ ID NO: 4037 - protein, 11 aa, Artificial
  IGFBP-2 heparin binding domain-containing peptide sequence
KHKVGIEEPHK

SEQ ID NO: 4038 - protein, 11 aa, Artificial
  IGFBP-2 heparin binding domain-containing peptide sequence
RHKVGIEEPHK

SEQ ID NO: 4039 - protein, 11 aa, Artificial
  IGFBP-2 heparin binding domain-containing peptide sequence
HHKVGIEEPHK

SEQ ID NO: 4040 - protein, 11 aa, Artificial
  IGFBP-2 heparin binding domain-containing peptide sequence
KKKVGIEEPHK

SEQ ID NO: 4041 - protein, 11 aa, Artificial
  IGFBP-2 heparin binding domain-containing peptide sequence
RKKVGIEEPHK

SEQ ID NO: 4042 - protein, 11 aa, Artificial
  IGFBP-2 heparin binding domain-containing peptide sequence
HKKVGIEEPHK

SEQ ID NO: 4043 - protein, 11 aa, Artificial
  IGFBP-2 heparin binding domain-containing peptide sequence
KRKVGIEEPHK

SEQ ID NO: 4044 - protein, 11 aa, Artificial
  IGFBP-2 heparin binding domain-containing peptide sequence
RRKVGIEEPHK

SEQ ID NO: 4045 - protein, 11 aa, Artificial
  IGFBP-2 heparin binding domain-containing peptide sequence
HRKVGIEEPHK

SEQ ID NO: 4046 - protein, 11 aa, Artificial
  IGFBP-2 heparin binding domain-containing peptide sequence
KHRVGIEEPHK

SEQ ID NO: 4047 - protein, 11 aa, Artificial
  IGFBP-2 heparin binding domain-containing peptide sequence
RHRVGIEEPHK

SEQ ID NO: 4048 - protein, 11 aa, Artificial
  IGFBP-2 heparin binding domain-containing peptide sequence
HHRVGIEEPHK

SEQ ID NO: 4049 - protein, 11 aa, Artificial
  IGFBP-2 heparin binding domain-containing peptide sequence
KKRVGIEEPHK

SEQ ID NO: 4050 - protein, 11 aa, Artificial
  IGFBP-2 heparin binding domain-containing peptide sequence
RKRVGIEEPHK

SEQ ID NO: 4051 - protein, 11 aa, Artificial
  IGFBP-2 heparin binding domain-containing peptide sequence
HKRVGIEEPHK

SEQ ID NO: 4052 - protein, 11 aa, Artificial
  IGFBP-2 heparin binding domain-containing peptide sequence
KRRVGIEEPHK

SEQ ID NO: 4053 - protein, 11 aa, Artificial
  IGFBP-2 heparin binding domain-containing peptide sequence
RRRVGIEEPHK

SEQ ID NO: 4054 - protein, 11 aa, Artificial
  IGFBP-2 heparin binding domain-containing peptide sequence
HRRVGIEEPHK

SEQ ID NO: 4055 - protein, 11 aa, Artificial
  IGFBP-2 heparin binding domain-containing peptide sequence
KHHLGVEEPHK

SEQ ID NO: 4056 - protein, 11 aa, Artificial
  IGFBP-2 heparin binding domain-containing peptide sequence
RHHLGVEEPHK

SEQ ID NO: 4057 - protein, 11 aa, Artificial
  IGFBP-2 heparin binding domain-containing peptide sequence
HHHLGVEEPHK

SEQ ID NO: 4058 - protein, 11 aa, Artificial
  IGFBP-2 heparin binding domain-containing peptide sequence
KKHLGVEEPHK

SEQ ID NO: 4059 - protein, 11 aa, Artificial
  IGFBP-2 heparin binding domain-containing peptide sequence
RKHLGVEEPHK

SEQ ID NO: 4060 - protein, 11 aa, Artificial
  IGFBP-2 heparin binding domain-containing peptide sequence
HKHLGVEEPHK

SEQ ID NO: 4061 - protein, 11 aa, Artificial
  IGFBP-2 heparin binding domain-containing peptide sequence
KRHLGVEEPHK

SEQ ID NO: 4062 - protein, 11 aa, Artificial
  IGFBP-2 heparin binding domain-containing peptide sequence
RRHLGVEEPHK

SEQ ID NO: 4063 - protein, 11 aa, Artificial
  IGFBP-2 heparin binding domain-containing peptide sequence
HRHLGVEEPHK

SEQ ID NO: 4064 - protein, 11 aa, Artificial
  IGFBP-2 heparin binding domain-containing peptide sequence
KHKLGVEEPHK

SEQ ID NO: 4065 - protein, 11 aa, Artificial
  IGFBP-2 heparin binding domain-containing peptide sequence
RHKLGVEEPHK

SEQ ID NO: 4066 - protein, 11 aa, Artificial
  IGFBP-2 heparin binding domain-containing peptide sequence
HHKLGVEEPHK

SEQ ID NO: 4067 - protein, 11 aa, Artificial
  IGFBP-2 heparin binding domain-containing peptide sequence
KKKLGVEEPHK

SEQ ID NO: 4068 - protein, 11 aa, Artificial
  IGFBP-2 heparin binding domain-containing peptide sequence
RKKLGVEEPHK

SEQ ID NO: 4069 - protein, 11 aa, Artificial
  IGFBP-2 heparin binding domain-containing peptide sequence
HKKLGVEEPHK

SEQ ID NO: 4070 - protein, 11 aa, Artificial
  IGFBP-2 heparin binding domain-containing peptide sequence
KRKLGVEEPHK

SEQ ID NO: 4071 - protein, 11 aa, Artificial
  IGFBP-2 heparin binding domain-containing peptide sequence
RRKLGVEEPHK

SEQ ID NO: 4072 - protein, 11 aa, Artificial
  IGFBP-2 heparin binding domain-containing peptide sequence
HRKLGVEEPHK

SEQ ID NO: 4073 - protein, 11 aa, Artificial
  IGFBP-2 heparin binding domain-containing peptide sequence
KHRLGVEEPHK

SEQ ID NO: 4074 - protein, 11 aa, Artificial
  IGFBP-2 heparin binding domain-containing peptide sequence
RHRLGVEEPHK

SEQ ID NO: 4075 - protein, 11 aa, Artificial
  IGFBP-2 heparin binding domain-containing peptide sequence
HHRLGVEEPHK

SEQ ID NO: 4076 - protein, 11 aa, Artificial
  IGFBP-2 heparin binding domain-containing peptide sequence
KKRLGVEEPHK

SEQ ID NO: 4077 - protein, 11 aa, Artificial
  IGFBP-2 heparin binding domain-containing peptide sequence
RKRLGVEEPHK

SEQ ID NO: 4078 - protein, 11 aa, Artificial
  IGFBP-2 heparin binding domain-containing peptide sequence
HKRLGVEEPHK

SEQ ID NO: 4079 - protein, 11 aa, Artificial
  IGFBP-2 heparin binding domain-containing peptide sequence
KRRLGVEEPHK

SEQ ID NO: 4080 - protein, 11 aa, Artificial
  IGFBP-2 heparin binding domain-containing peptide sequence
RRRLGVEEPHK

SEQ ID NO: 4081 - protein, 11 aa, Artificial
  IGFBP-2 heparin binding domain-containing peptide sequence
HRRLGVEEPHK

SEQ ID NO: 4082 - protein, 11 aa, Artificial
  IGFBP-2 heparin binding domain-containing peptide sequence
KHHIGVEEPHK

SEQ ID NO: 4083 - protein, 11 aa, Artificial
  IGFBP-2 heparin binding domain-containing peptide sequence
RHHIGVEEPHK

SEQ ID NO: 4084 - protein, 11 aa, Artificial
  IGFBP-2 heparin binding domain-containing peptide sequence
HHHIGVEEPHK

SEQ ID NO: 4085 - protein, 11 aa, Artificial
  IGFBP-2 heparin binding domain-containing peptide sequence
KKHIGVEEPHK

SEQ ID NO: 4086 - protein, 11 aa, Artificial
  IGFBP-2 heparin binding domain-containing peptide sequence
RKHIGVEEPHK

SEQ ID NO: 4087 - protein, 11 aa, Artificial
  IGFBP-2 heparin binding domain-containing peptide sequence
HKHIGVEEPHK

SEQ ID NO: 4088 - protein, 11 aa, Artificial
  IGFBP-2 heparin binding domain-containing peptide sequence
KRHIGVEEPHK

SEQ ID NO: 4089 - protein, 11 aa, Artificial
  IGFBP-2 heparin binding domain-containing peptide sequence
RRHIGVEEPHK

SEQ ID NO: 4090 - protein, 11 aa, Artificial
  IGFBP-2 heparin binding domain-containing peptide sequence
HRHIGVEEPHK

SEQ ID NO: 4091 - protein, 11 aa, Artificial
  IGFBP-2 heparin binding domain-containing peptide sequence
KHKIGVEEPHK

SEQ ID NO: 4092 - protein, 11 aa, Artificial
  IGFBP-2 heparin binding domain-containing peptide sequence
RHKIGVEEPHK

SEQ ID NO: 4093 - protein, 11 aa, Artificial
  IGFBP-2 heparin binding domain-containing peptide sequence
HHKIGVEEPHK

SEQ ID NO: 4094 - protein, 11 aa, Artificial
  IGFBP-2 heparin binding domain-containing peptide sequence
KKKIGVEEPHK

SEQ ID NO: 4095 - protein, 11 aa, Artificial
  IGFBP-2 heparin binding domain-containing peptide sequence
RKKIGVEEPHK

SEQ ID NO: 4096 - protein, 11 aa, Artificial
  IGFBP-2 heparin binding domain-containing peptide sequence
HKKIGVEEPHK

SEQ ID NO: 4097 - protein, 11 aa, Artificial
  IGFBP-2 heparin binding domain-containing peptide sequence
KRKIGVEEPHK

SEQ ID NO: 4098 - protein, 11 aa, Artificial
  IGFBP-2 heparin binding domain-containing peptide sequence
RRKIGVEEPHK

SEQ ID NO: 4099 - protein, 11 aa, Artificial
  IGFBP-2 heparin binding domain-containing peptide sequence
HRKIGVEEPHK

SEQ ID NO: 4100 - protein, 11 aa, Artificial
  IGFBP-2 heparin binding domain-containing peptide sequence
KHRIGVEEPHK

SEQ ID NO: 4101 - protein, 11 aa, Artificial
  IGFBP-2 heparin binding domain-containing peptide sequence
RHRIGVEEPHK

SEQ ID NO: 4102 - protein, 11 aa, Artificial
  IGFBP-2 heparin binding domain-containing peptide sequence
HHRIGVEEPHK

SEQ ID NO: 4103 - protein, 11 aa, Artificial
  IGFBP-2 heparin binding domain-containing peptide sequence
KKRIGVEEPHK

SEQ ID NO: 4104 - protein, 11 aa, Artificial
  IGFBP-2 heparin binding domain-containing peptide sequence
RKRIGVEEPHK

SEQ ID NO: 4105 - protein, 11 aa, Artificial
  IGFBP-2 heparin binding domain-containing peptide sequence
HKRIGVEEPHK

SEQ ID NO: 4106 - protein, 11 aa, Artificial
  IGFBP-2 heparin binding domain-containing peptide sequence
KRRIGVEEPHK

SEQ ID NO: 4107 - protein, 11 aa, Artificial
  IGFBP-2 heparin binding domain-containing peptide sequence
RRRIGVEEPHK

SEQ ID NO: 4108 - protein, 11 aa, Artificial
  IGFBP-2 heparin binding domain-containing peptide sequence
HRRIGVEEPHK

SEQ ID NO: 4109 - protein, 11 aa, Artificial
  IGFBP-2 heparin binding domain-containing peptide sequence
KHHVGVEEPHK

SEQ ID NO: 4110 - protein, 11 aa, Artificial
  IGFBP-2 heparin binding domain-containing peptide sequence
RHHVGVEEPHK

SEQ ID NO: 4111 - protein, 11 aa, Artificial
  IGFBP-2 heparin binding domain-containing peptide sequence
HHHVGVEEPHK

SEQ ID NO: 4112 - protein, 11 aa, Artificial
  IGFBP-2 heparin binding domain-containing peptide sequence
KKHVGVEEPHK

SEQ ID NO: 4113 - protein, 11 aa, Artificial
  IGFBP-2 heparin binding domain-containing peptide sequence
RKHVGVEEPHK

SEQ ID NO: 4114 - protein, 11 aa, Artificial
  IGFBP-2 heparin binding domain-containing peptide sequence
HKHVGVEEPHK

SEQ ID NO: 4115 - protein, 11 aa, Artificial
  IGFBP-2 heparin binding domain-containing peptide sequence
KRHVGVEEPHK

SEQ ID NO: 4116 - protein, 11 aa, Artificial
  IGFBP-2 heparin binding domain-containing peptide sequence
RRHVGVEEPHK

SEQ ID NO: 4117 - protein, 11 aa, Artificial
  IGFBP-2 heparin binding domain-containing peptide sequence
HRHVGVEEPHK

SEQ ID NO: 4118 - protein, 11 aa, Artificial
  IGFBP-2 heparin binding domain-containing peptide sequence
KHKVGVEEPHK

SEQ ID NO: 4119 - protein, 11 aa, Artificial
  IGFBP-2 heparin binding domain-containing peptide sequence
RHKVGVEEPHK

SEQ ID NO: 4120 - protein, 11 aa, Artificial
  IGFBP-2 heparin binding domain-containing peptide sequence
HHKVGVEEPHK

SEQ ID NO: 4121 - protein, 11 aa, Artificial
  IGFBP-2 heparin binding domain-containing peptide sequence
KKKVGVEEPHK

SEQ ID NO: 4122 - protein, 11 aa, Artificial
  IGFBP-2 heparin binding domain-containing peptide sequence
RKKVGVEEPHK

SEQ ID NO: 4123 - protein, 11 aa, Artificial
  IGFBP-2 heparin binding domain-containing peptide sequence
HKKVGVEEPHK

SEQ ID NO: 4124 - protein, 11 aa, Artificial
  IGFBP-2 heparin binding domain-containing peptide sequence
KRKVGVEEPHK

SEQ ID NO: 4125 - protein, 11 aa, Artificial
  IGFBP-2 heparin binding domain-containing peptide sequence
RRKVGVEEPHK

SEQ ID NO: 4126 - protein, 11 aa, Artificial
  IGFBP-2 heparin binding domain-containing peptide sequence
HRKVGVEEPHK

SEQ ID NO: 4127 - protein, 11 aa, Artificial
  IGFBP-2 heparin binding domain-containing peptide sequence
KHRVGVEEPHK

SEQ ID NO: 4128 - protein, 11 aa, Artificial
  IGFBP-2 heparin binding domain-containing peptide sequence
RHRVGVEEPHK

SEQ ID NO: 4129 - protein, 11 aa, Artificial
  IGFBP-2 heparin binding domain-containing peptide sequence
HHRVGVEEPHK

SEQ ID NO: 4130 - protein, 11 aa, Artificial
  IGFBP-2 heparin binding domain-containing peptide sequence
KKRVGVEEPHK

SEQ ID NO: 4131 - protein, 11 aa, Artificial
  IGFBP-2 heparin binding domain-containing peptide sequence
RKRVGVEEPHK

SEQ ID NO: 4132 - protein, 11 aa, Artificial
  IGFBP-2 heparin binding domain-containing peptide sequence
HKRVGVEEPHK

SEQ ID NO: 4133 - protein, 11 aa, Artificial
  IGFBP-2 heparin binding domain-containing peptide sequence
KRRVGVEEPHK

SEQ ID NO: 4134 - protein, 11 aa, Artificial
  IGFBP-2 heparin binding domain-containing peptide sequence
RRRVGVEEPHK

SEQ ID NO: 4135 - protein, 11 aa, Artificial
  IGFBP-2 heparin binding domain-containing peptide sequence
HRRVGVEEPHK

SEQ ID NO: 4136 - protein, 11 aa, Artificial
  IGFBP-2 heparin binding domain-containing peptide sequence
KHHLGLNEPHK

SEQ ID NO: 4137 - protein, 11 aa, Artificial
  IGFBP-2 heparin binding domain-containing peptide sequence
RHHLGLNEPHK

SEQ ID NO: 4138 - protein, 11 aa, Artificial
  IGFBP-2 heparin binding domain-containing peptide sequence
HHHLGLNEPHK

SEQ ID NO: 4139 - protein, 11 aa, Artificial
  IGFBP-2 heparin binding domain-containing peptide sequence
KKHLGLNEPHK

SEQ ID NO: 4140 - protein, 11 aa, Artificial
  IGFBP-2 heparin binding domain-containing peptide sequence
RKHLGLNEPHK

SEQ ID NO: 4141 - protein, 11 aa, Artificial
  IGFBP-2 heparin binding domain-containing peptide sequence
HKHLGLNEPHK

SEQ ID NO: 4142 - protein, 11 aa, Artificial
  IGFBP-2 heparin binding domain-containing peptide sequence
KRHLGLNEPHK

SEQ ID NO: 4143 - protein, 11 aa, Artificial
  IGFBP-2 heparin binding domain-containing peptide sequence
RRHLGLNEPHK

SEQ ID NO: 4144 - protein, 11 aa, Artificial
  IGFBP-2 heparin binding domain-containing peptide sequence
HRHLGLNEPHK

SEQ ID NO: 4145 - protein, 11 aa, Artificial
  IGFBP-2 heparin binding domain-containing peptide sequence
KHKLGLNEPHK

SEQ ID NO: 4146 - protein, 11 aa, Artificial
  IGFBP-2 heparin binding domain-containing peptide sequence
RHKLGLNEPHK

SEQ ID NO: 4147 - protein, 11 aa, Artificial
  IGFBP-2 heparin binding domain-containing peptide sequence
HHKLGLNEPHK

SEQ ID NO: 4148 - protein, 11 aa, Artificial
  IGFBP-2 heparin binding domain-containing peptide sequence
KKKLGLNEPHK

SEQ ID NO: 4149 - protein, 11 aa, Artificial
  IGFBP-2 heparin binding domain-containing peptide sequence
RKKLGLNEPHK

SEQ ID NO: 4150 - protein, 11 aa, Artificial
  IGFBP-2 heparin binding domain-containing peptide sequence
HKKLGLNEPHK

SEQ ID NO: 4151 - protein, 11 aa, Artificial
  IGFBP-2 heparin binding domain-containing peptide sequence
KRKLGLNEPHK

SEQ ID NO: 4152 - protein, 11 aa, Artificial
  IGFBP-2 heparin binding domain-containing peptide sequence
RRKLGLNEPHK

SEQ ID NO: 4153 - protein, 11 aa, Artificial
  IGFBP-2 heparin binding domain-containing peptide sequence
HRKLGLNEPHK

SEQ ID NO: 4154 - protein, 11 aa, Artificial
  IGFBP-2 heparin binding domain-containing peptide sequence
KHRLGLNEPHK

SEQ ID NO: 4155 - protein, 11 aa, Artificial
  IGFBP-2 heparin binding domain-containing peptide sequence
RHRLGLNEPHK

SEQ ID NO: 4156 - protein, 11 aa, Artificial
  IGFBP-2 heparin binding domain-containing peptide sequence
HHRLGLNEPHK

SEQ ID NO: 4157 - protein, 11 aa, Artificial
  IGFBP-2 heparin binding domain-containing peptide sequence
KKRLGLNEPHK

SEQ ID NO: 4158 - protein, 11 aa, Artificial
  IGFBP-2 heparin binding domain-containing peptide sequence
RKRLGLNEPHK

SEQ ID NO: 4159 - protein, 11 aa, Artificial
  IGFBP-2 heparin binding domain-containing peptide sequence
HKRLGLNEPHK

SEQ ID NO: 4160 - protein, 11 aa, Artificial
  IGFBP-2 heparin binding domain-containing peptide sequence
KRRLGLNEPHK

SEQ ID NO: 4161 - protein, 11 aa, Artificial
  IGFBP-2 heparin binding domain-containing peptide sequence
RRRLGLNEPHK

SEQ ID NO: 4162 - protein, 11 aa, Artificial
  IGFBP-2 heparin binding domain-containing peptide sequence
HRRLGLNEPHK

SEQ ID NO: 4163 - protein, 10 aa, Artificial
  IGFBP-2 heparin binding domain-containing peptide sequence
KHHIGLNPHK

SEQ ID NO: 4164 - protein, 11 aa, Artificial
  IGFBP-2 heparin binding domain-containing peptide sequence
RHHIGLNEPHK

SEQ ID NO: 4165 - protein, 11 aa, Artificial
  IGFBP-2 heparin binding domain-containing peptide sequence
HHHIGLNEPHK

SEQ ID NO: 4166 - protein, 11 aa, Artificial
  IGFBP-2 heparin binding domain-containing peptide sequence
KKHIGLNEPHK

SEQ ID NO: 4167 - protein, 11 aa, Artificial
  IGFBP-2 heparin binding domain-containing peptide sequence
RKHIGLNEPHK

SEQ ID NO: 4168 - protein, 11 aa, Artificial
  IGFBP-2 heparin binding domain-containing peptide sequence
HKHIGLNEPHK

SEQ ID NO: 4169 - protein, 11 aa, Artificial
  IGFBP-2 heparin binding domain-containing peptide sequence
KRHIGLNEPHK

SEQ ID NO: 4170 - protein, 11 aa, Artificial
  IGFBP-2 heparin binding domain-containing peptide sequence
RRHIGLNEPHK

SEQ ID NO: 4171 - protein, 11 aa, Artificial
  IGFBP-2 heparin binding domain-containing peptide sequence
HRHIGLNEPHK

SEQ ID NO: 4172 - protein, 11 aa, Artificial
  IGFBP-2 heparin binding domain-containing peptide sequence
KHKIGLNEPHK

SEQ ID NO: 4173 - protein, 11 aa, Artificial
  IGFBP-2 heparin binding domain-containing peptide sequence
RHKIGLNEPHK

SEQ ID NO: 4174 - protein, 11 aa, Artificial
  IGFBP-2 heparin binding domain-containing peptide sequence
HHKIGLNEPHK

SEQ ID NO: 4175 - protein, 11 aa, Artificial
  IGFBP-2 heparin binding domain-containing peptide sequence
KKKIGLNEPHK

SEQ ID NO: 4176 - protein, 11 aa, Artificial
  IGFBP-2 heparin binding domain-containing peptide sequence
RKKIGLNEPHK

SEQ ID NO: 4177 - protein, 11 aa, Artificial
  IGFBP-2 heparin binding domain-containing peptide sequence
HKKIGLNEPHK

SEQ ID NO: 4178 - protein, 11 aa, Artificial
  IGFBP-2 heparin binding domain-containing peptide sequence
KRKIGLNEPHK

SEQ ID NO: 4179 - protein, 11 aa, Artificial
  IGFBP-2 heparin binding domain-containing peptide sequence
RRKIGLNEPHK

SEQ ID NO: 4180 - protein, 11 aa, Artificial
  IGFBP-2 heparin binding domain-containing peptide sequence
HRKIGLNEPHK

SEQ ID NO: 4181 - protein, 11 aa, Artificial
  IGFBP-2 heparin binding domain-containing peptide sequence
KHRIGLNEPHK

SEQ ID NO: 4182 - protein, 11 aa, Artificial
  IGFBP-2 heparin binding domain-containing peptide sequence
RHRIGLNEPHK

SEQ ID NO: 4183 - protein, 11 aa, Artificial
  IGFBP-2 heparin binding domain-containing peptide sequence
HHRIGLNEPHK

SEQ ID NO: 4184 - protein, 11 aa, Artificial
  IGFBP-2 heparin binding domain-containing peptide sequence
KKRIGLNEPHK

SEQ ID NO: 4185 - protein, 11 aa, Artificial
  IGFBP-2 heparin binding domain-containing peptide sequence
RKRIGLNEPHK

SEQ ID NO: 4186 - protein, 11 aa, Artificial
  IGFBP-2 heparin binding domain-containing peptide sequence
HKRIGLNEPHK

SEQ ID NO: 4187 - protein, 11 aa, Artificial
  IGFBP-2 heparin binding domain-containing peptide sequence
KRRIGLNEPHK

SEQ ID NO: 4188 - protein, 11 aa, Artificial
  IGFBP-2 heparin binding domain-containing peptide sequence
RRRIGLNEPHK

SEQ ID NO: 4189 - protein, 11 aa, Artificial
  IGFBP-2 heparin binding domain-containing peptide sequence
HRRIGLNEPHK

SEQ ID NO: 4190 - protein, 11 aa, Artificial
  IGFBP-2 heparin binding domain-containing peptide sequence
KHHVGLNEPHK

SEQ ID NO: 4191 - protein, 11 aa, Artificial
  IGFBP-2 heparin binding domain-containing peptide sequence
RHHVGLNEPHK

SEQ ID NO: 4192 - protein, 11 aa, Artificial
  IGFBP-2 heparin binding domain-containing peptide sequence
HHHVGLNEPHK

SEQ ID NO: 4193 - protein, 11 aa, Artificial
  IGFBP-2 heparin binding domain-containing peptide sequence
KKHVGLNEPHK

SEQ ID NO: 4194 - protein, 11 aa, Artificial
  IGFBP-2 heparin binding domain-containing peptide sequence
RKHVGLNEPHK

SEQ ID NO: 4195 - protein, 11 aa, Artificial
  IGFBP-2 heparin binding domain-containing peptide sequence
HKHVGLNEPHK

SEQ ID NO: 4196 - protein, 11 aa, Artificial
  IGFBP-2 heparin binding domain-containing peptide sequence
KRHVGLNEPHK

SEQ ID NO: 4197 - protein, 11 aa, Artificial
  IGFBP-2 heparin binding domain-containing peptide sequence
RRHVGLNEPHK

SEQ ID NO: 4198 - protein, 11 aa, Artificial
  IGFBP-2 heparin binding domain-containing peptide sequence
HRHVGLNEPHK

SEQ ID NO: 4199 - protein, 11 aa, Artificial
  IGFBP-2 heparin binding domain-containing peptide sequence
KHKVGLNEPHK

SEQ ID NO: 4200 - protein, 11 aa, Artificial
  IGFBP-2 heparin binding domain-containing peptide sequence
RHKVGLNEPHK

SEQ ID NO: 4201 - protein, 11 aa, Artificial
  IGFBP-2 heparin binding domain-containing peptide sequence
HHKVGLNEPHK

SEQ ID NO: 4202 - protein, 11 aa, Artificial
  IGFBP-2 heparin binding domain-containing peptide sequence
KKKVGLNEPHK

SEQ ID NO: 4203 - protein, 11 aa, Artificial
  IGFBP-2 heparin binding domain-containing peptide sequence
RKKVGLNEPHK

SEQ ID NO: 4204 - protein, 11 aa, Artificial
  IGFBP-2 heparin binding domain-containing peptide sequence
HKKVGLNEPHK

SEQ ID NO: 4205 - protein, 11 aa, Artificial
  IGFBP-2 heparin binding domain-containing peptide sequence
KRKVGLNEPHK

SEQ ID NO: 4206 - protein, 11 aa, Artificial
  IGFBP-2 heparin binding domain-containing peptide sequence
RRKVGLNEPHK

SEQ ID NO: 4207 - protein, 11 aa, Artificial
  IGFBP-2 heparin binding domain-containing peptide sequence
HRKVGLNEPHK

SEQ ID NO: 4208 - protein, 11 aa, Artificial
  IGFBP-2 heparin binding domain-containing peptide sequence
KHRVGLNEPHK

SEQ ID NO: 4209 - protein, 11 aa, Artificial
  IGFBP-2 heparin binding domain-containing peptide sequence
RHRVGLNEPHK

SEQ ID NO: 4210 - protein, 11 aa, Artificial
  IGFBP-2 heparin binding domain-containing peptide sequence
HHRVGLNEPHK

SEQ ID NO: 4211 - protein, 11 aa, Artificial
  IGFBP-2 heparin binding domain-containing peptide sequence
KKRVGLNEPHK

SEQ ID NO: 4212 - protein, 11 aa, Artificial
  IGFBP-2 heparin binding domain-containing peptide sequence
RKRVGLNEPHK

SEQ ID NO: 4213 - protein, 11 aa, Artificial
  IGFBP-2 heparin binding domain-containing peptide sequence
HKRVGLNEPHK

SEQ ID NO: 4214 - protein, 11 aa, Artificial
  IGFBP-2 heparin binding domain-containing peptide sequence
KRRVGLNEPHK

SEQ ID NO: 4215 - protein, 11 aa, Artificial
  IGFBP-2 heparin binding domain-containing peptide sequence
RRRVGLNEPHK

SEQ ID NO: 4216 - protein, 11 aa, Artificial
  IGFBP-2 heparin binding domain-containing peptide sequence
HRRVGLNEPHK

SEQ ID NO: 4217 - protein, 11 aa, Artificial
  IGFBP-2 heparin binding domain-containing peptide sequence
KHHLGINEPHK

SEQ ID NO: 4218 - protein, 11 aa, Artificial
  IGFBP-2 heparin binding domain-containing peptide sequence
RHHLGINEPHK

SEQ ID NO: 4219 - protein, 11 aa, Artificial
  IGFBP-2 heparin binding domain-containing peptide sequence
HHHLGINEPHK

SEQ ID NO: 4220 - protein, 11 aa, Artificial
  IGFBP-2 heparin binding domain-containing peptide sequence
KKHLGINEPHK

SEQ ID NO: 4221 - protein, 11 aa, Artificial
  IGFBP-2 heparin binding domain-containing peptide sequence
RKHLGINEPHK

SEQ ID NO: 4222 - protein, 11 aa, Artificial
  IGFBP-2 heparin binding domain-containing peptide sequence
HKHLGINEPHK

SEQ ID NO: 4223 - protein, 11 aa, Artificial
  IGFBP-2 heparin binding domain-containing peptide sequence
KRHLGINEPHK

SEQ ID NO: 4224 - protein, 11 aa, Artificial
  IGFBP-2 heparin binding domain-containing peptide sequence
RRHLGINEPHK

SEQ ID NO: 4225 - protein, 11 aa, Artificial
  IGFBP-2 heparin binding domain-containing peptide sequence
HRHLGINEPHK

SEQ ID NO: 4226 - protein, 11 aa, Artificial
  IGFBP-2 heparin binding domain-containing peptide sequence
KHKLGINEPHK

SEQ ID NO: 4227 - protein, 11 aa, Artificial
  IGFBP-2 heparin binding domain-containing peptide sequence
RHKLGINEPHK

SEQ ID NO: 4228 - protein, 11 aa, Artificial
  IGFBP-2 heparin binding domain-containing peptide sequence
HHKLGINEPHK

SEQ ID NO: 4229 - protein, 11 aa, Artificial
  IGFBP-2 heparin binding domain-containing peptide sequence
KKKLGINEPHK

SEQ ID NO: 4230 - protein, 11 aa, Artificial
  IGFBP-2 heparin binding domain-containing peptide sequence
RKKLGINEPHK

SEQ ID NO: 4231 - protein, 11 aa, Artificial
  IGFBP-2 heparin binding domain-containing peptide sequence
HKKLGINEPHK

SEQ ID NO: 4232 - protein, 11 aa, Artificial
  IGFBP-2 heparin binding domain-containing peptide sequence
KRKLGINEPHK

SEQ ID NO: 4233 - protein, 11 aa, Artificial
  IGFBP-2 heparin binding domain-containing peptide sequence
RRKLGINEPHK

SEQ ID NO: 4234 - protein, 11 aa, Artificial
  IGFBP-2 heparin binding domain-containing peptide sequence
HRKLGINEPHK

SEQ ID NO: 4235 - protein, 11 aa, Artificial
  IGFBP-2 heparin binding domain-containing peptide sequence
KHRLGINEPHK

SEQ ID NO: 4236 - protein, 11 aa, Artificial
  IGFBP-2 heparin binding domain-containing peptide sequence
RHRLGINEPHK

SEQ ID NO: 4237 - protein, 11 aa, Artificial
  IGFBP-2 heparin binding domain-containing peptide sequence
HHRLGINEPHK

SEQ ID NO: 4238 - protein, 11 aa, Artificial
  IGFBP-2 heparin binding domain-containing peptide sequence
KKRLGINEPHK

SEQ ID NO: 4239 - protein, 11 aa, Artificial
  IGFBP-2 heparin binding domain-containing peptide sequence
RKRLGINEPHK

SEQ ID NO: 4240 - protein, 11 aa, Artificial
  IGFBP-2 heparin binding domain-containing peptide sequence
HKRLGINEPHK

SEQ ID NO: 4241 - protein, 11 aa, Artificial
  IGFBP-2 heparin binding domain-containing peptide sequence
KRRLGINEPHK

SEQ ID NO: 4242 - protein, 11 aa, Artificial
  IGFBP-2 heparin binding domain-containing peptide sequence
RRRLGINEPHK

SEQ ID NO: 4243 - protein, 11 aa, Artificial
  IGFBP-2 heparin binding domain-containing peptide sequence
HRRLGINEPHK

SEQ ID NO: 4244 - protein, 11 aa, Artificial
  IGFBP-2 heparin binding domain-containing peptide sequence
KHHIGIENPHK

SEQ ID NO: 4245 - protein, 11 aa, Artificial
  IGFBP-2 heparin binding domain-containing peptide sequence
RHHIGINEPHK

SEQ ID NO: 4246 - protein, 11 aa, Artificial
  IGFBP-2 heparin binding domain-containing peptide sequence
HHHIGINEPHK

SEQ ID NO: 4247 - protein, 11 aa, Artificial
  IGFBP-2 heparin binding domain-containing peptide sequence
KKHIGINEPHK

SEQ ID NO: 4248 - protein, 11 aa, Artificial
  IGFBP-2 heparin binding domain-containing peptide sequence
RKHIGINEPHK

SEQ ID NO: 4249 - protein, 11 aa, Artificial
  IGFBP-2 heparin binding domain-containing peptide sequence
HKHIGINEPHK

SEQ ID NO: 4250 - protein, 11 aa, Artificial
  IGFBP-2 heparin binding domain-containing peptide sequence
KRHIGINEPHK

SEQ ID NO: 4251 - protein, 11 aa, Artificial
  IGFBP-2 heparin binding domain-containing peptide sequence
RRHIGINEPHK

SEQ ID NO: 4252 - protein, 11 aa, Artificial
  IGFBP-2 heparin binding domain-containing peptide sequence
HRHIGINEPHK

SEQ ID NO: 4253 - protein, 11 aa, Artificial
  IGFBP-2 heparin binding domain-containing peptide sequence
KHKIGINEPHK

SEQ ID NO: 4254 - protein, 11 aa, Artificial
  IGFBP-2 heparin binding domain-containing peptide sequence
RHKIGINEPHK

SEQ ID NO: 4255 - protein, 11 aa, Artificial
  IGFBP-2 heparin binding domain-containing peptide sequence
HHKIGINEPHK

SEQ ID NO: 4256 - protein, 11 aa, Artificial
  IGFBP-2 heparin binding domain-containing peptide sequence
KKKIGINEPHK

SEQ ID NO: 4257 - protein, 11 aa, Artificial
  IGFBP-2 heparin binding domain-containing peptide sequence
RKKIGINEPHK

SEQ ID NO: 4258 - protein, 11 aa, Artificial
  IGFBP-2 heparin binding domain-containing peptide sequence
HKKIGINEPHK

SEQ ID NO: 4259 - protein, 11 aa, Artificial
  IGFBP-2 heparin binding domain-containing peptide sequence
KRKIGINEPHK

SEQ ID NO: 4260 - protein, 11 aa, Artificial
  IGFBP-2 heparin binding domain-containing peptide sequence
RRKIGINEPHK

SEQ ID NO: 4261 - protein, 11 aa, Artificial
  IGFBP-2 heparin binding domain-containing peptide sequence
HRKIGINEPHK

SEQ ID NO: 4262 - protein, 11 aa, Artificial
  IGFBP-2 heparin binding domain-containing peptide sequence
KHRIGINEPHK

SEQ ID NO: 4263 - protein, 11 aa, Artificial
  IGFBP-2 heparin binding domain-containing peptide sequence
RHRIGINEPHK

SEQ ID NO: 4264 - protein, 11 aa, Artificial
  IGFBP-2 heparin binding domain-containing peptide sequence
HHRIGINEPHK

SEQ ID NO: 4265 - protein, 11 aa, Artificial
  IGFBP-2 heparin binding domain-containing peptide sequence
KKRIGINEPHK

SEQ ID NO: 4266 - protein, 11 aa, Artificial
  IGFBP-2 heparin binding domain-containing peptide sequence
RKRIGINEPHK

SEQ ID NO: 4267 - protein, 11 aa, Artificial
  IGFBP-2 heparin binding domain-containing peptide sequence
HKRIGINEPHK

SEQ ID NO: 4268 - protein, 11 aa, Artificial
  IGFBP-2 heparin binding domain-containing peptide sequence
KRRIGINEPHK

SEQ ID NO: 4269 - protein, 11 aa, Artificial
  IGFBP-2 heparin binding domain-containing peptide sequence
RRRIGINEPHK

SEQ ID NO: 4270 - protein, 11 aa, Artificial
  IGFBP-2 heparin binding domain-containing peptide sequence
HRRIGINEPHK

SEQ ID NO: 4271 - protein, 11 aa, Artificial
  IGFBP-2 heparin binding domain-containing peptide sequence
KHHVGINEPHK

SEQ ID NO: 4272 - protein, 11 aa, Artificial
  IGFBP-2 heparin binding domain-containing peptide sequence
RHHVGINEPHK

SEQ ID NO: 4273 - protein, 11 aa, Artificial
  IGFBP-2 heparin binding domain-containing peptide sequence
HHHVGINEPHK

SEQ ID NO: 4274 - protein, 11 aa, Artificial
  IGFBP-2 heparin binding domain-containing peptide sequence
KKHVGINEPHK

SEQ ID NO: 4275 - protein, 11 aa, Artificial
  IGFBP-2 heparin binding domain-containing peptide sequence
RKHVGINEPHK

SEQ ID NO: 4276 - protein, 11 aa, Artificial
  IGFBP-2 heparin binding domain-containing peptide sequence
HKHVGINEPHK

SEQ ID NO: 4277 - protein, 11 aa, Artificial
  IGFBP-2 heparin binding domain-containing peptide sequence
KRHVGINEPHK

SEQ ID NO: 4278 - protein, 11 aa, Artificial
  IGFBP-2 heparin binding domain-containing peptide sequence
RRHVGINEPHK

SEQ ID NO: 4279 - protein, 11 aa, Artificial
  IGFBP-2 heparin binding domain-containing peptide sequence
HRHVGINEPHK

SEQ ID NO: 4280 - protein, 11 aa, Artificial
  IGFBP-2 heparin binding domain-containing peptide sequence
KHKVGINEPHK

SEQ ID NO: 4281 - protein, 11 aa, Artificial
  IGFBP-2 heparin binding domain-containing peptide sequence
RHKVGINEPHK

SEQ ID NO: 4282 - protein, 11 aa, Artificial
  IGFBP-2 heparin binding domain-containing peptide sequence
HHKVGINEPHK

SEQ ID NO: 4283 - protein, 11 aa, Artificial
  IGFBP-2 heparin binding domain-containing peptide sequence
KKKVGINEPHK

SEQ ID NO: 4284 - protein, 11 aa, Artificial
  IGFBP-2 heparin binding domain-containing peptide sequence
RKKVGINEPHK

SEQ ID NO: 4285 - protein, 11 aa, Artificial
  IGFBP-2 heparin binding domain-containing peptide sequence
HKKVGINEPHK

SEQ ID NO: 4286 - protein, 11 aa, Artificial
  IGFBP-2 heparin binding domain-containing peptide sequence
KRKVGINEPHK

SEQ ID NO: 4287 - protein, 11 aa, Artificial
  IGFBP-2 heparin binding domain-containing peptide sequence
RRKVGINEPHK

SEQ ID NO: 4288 - protein, 11 aa, Artificial
  IGFBP-2 heparin binding domain-containing peptide sequence
HRKVGINEPHK

SEQ ID NO: 4289 - protein, 11 aa, Artificial
  IGFBP-2 heparin binding domain-containing peptide sequence
KHRVGINEPHK

SEQ ID NO: 4290 - protein, 11 aa, Artificial
  IGFBP-2 heparin binding domain-containing peptide sequence
RHRVGINEPHK

SEQ ID NO: 4291 - protein, 11 aa, Artificial
  IGFBP-2 heparin binding domain-containing peptide sequence
HHRVGINEPHK

SEQ ID NO: 4292 - protein, 11 aa, Artificial
  IGFBP-2 heparin binding domain-containing peptide sequence
KKRVGINEPHK

SEQ ID NO: 4293 - protein, 11 aa, Artificial
  IGFBP-2 heparin binding domain-containing peptide sequence
RKRVGINEPHK

SEQ ID NO: 4294 - protein, 11 aa, Artificial
  IGFBP-2 heparin binding domain-containing peptide sequence
HKRVGINEPHK

SEQ ID NO: 4295 - protein, 11 aa, Artificial
  IGFBP-2 heparin binding domain-containing peptide sequence
KRRVGINEPHK

SEQ ID NO: 4296 - protein, 11 aa, Artificial
  IGFBP-2 heparin binding domain-containing peptide sequence
RRRVGINEPHK

SEQ ID NO: 4297 - protein, 11 aa, Artificial
  IGFBP-2 heparin binding domain-containing peptide sequence
HRRVGINEPHK

SEQ ID NO: 4298 - protein, 11 aa, Artificial
  IGFBP-2 heparin binding domain-containing peptide sequence
KHHLGVNEPHK

SEQ ID NO: 4299 - protein, 11 aa, Artificial
  IGFBP-2 heparin binding domain-containing peptide sequence
RHHLGVNEPHK

SEQ ID NO: 4300 - protein, 11 aa, Artificial
  IGFBP-2 heparin binding domain-containing peptide sequence
HHHLGVNEPHK

SEQ ID NO: 4301 - protein, 11 aa, Artificial
  IGFBP-2 heparin binding domain-containing peptide sequence
KKHLGVNEPHK

SEQ ID NO: 4302 - protein, 11 aa, Artificial
  IGFBP-2 heparin binding domain-containing peptide sequence
RKHLGVNEPHK

SEQ ID NO: 4303 - protein, 11 aa, Artificial
  IGFBP-2 heparin binding domain-containing peptide sequence
HKHLGVNEPHK

SEQ ID NO: 4304 - protein, 11 aa, Artificial
  IGFBP-2 heparin binding domain-containing peptide sequence
KRHLGVNEPHK

SEQ ID NO: 4305 - protein, 11 aa, Artificial
  IGFBP-2 heparin binding domain-containing peptide sequence
RRHLGVNEPHK

SEQ ID NO: 4306 - protein, 11 aa, Artificial
  IGFBP-2 heparin binding domain-containing peptide sequence
HRHLGVNEPHK

SEQ ID NO: 4307 - protein, 11 aa, Artificial
  IGFBP-2 heparin binding domain-containing peptide sequence
KHKLGVNEPHK

SEQ ID NO: 4308 - protein, 11 aa, Artificial
  IGFBP-2 heparin binding domain-containing peptide sequence
RHKLGVNEPHK

SEQ ID NO: 4309 - protein, 11 aa, Artificial
  IGFBP-2 heparin binding domain-containing peptide sequence
HHKLGVNEPHK

SEQ ID NO: 4310 - protein, 11 aa, Artificial
  IGFBP-2 heparin binding domain-containing peptide sequence
KKKLGVNEPHK

SEQ ID NO: 4311 - protein, 11 aa, Artificial
  IGFBP-2 heparin binding domain-containing peptide sequence
RKKLGVNEPHK

SEQ ID NO: 4312 - protein, 11 aa, Artificial
  IGFBP-2 heparin binding domain-containing peptide sequence
HKKLGVNEPHK

SEQ ID NO: 4313 - protein, 11 aa, Artificial
  IGFBP-2 heparin binding domain-containing peptide sequence
KRKLGVNEPHK

SEQ ID NO: 4314 - protein, 11 aa, Artificial
  IGFBP-2 heparin binding domain-containing peptide sequence
RRKLGVNEPHK

SEQ ID NO: 4315 - protein, 11 aa, Artificial
  IGFBP-2 heparin binding domain-containing peptide sequence
HRKLGVNEPHK

SEQ ID NO: 4316 - protein, 11 aa, Artificial
  IGFBP-2 heparin binding domain-containing peptide sequence
KHRLGVNEPHK

SEQ ID NO: 4317 - protein, 11 aa, Artificial
  IGFBP-2 heparin binding domain-containing peptide sequence
RHRLGVNEPHK

SEQ ID NO: 4318 - protein, 11 aa, Artificial
  IGFBP-2 heparin binding domain-containing peptide sequence
HHRLGVNEPHK

SEQ ID NO: 4319 - protein, 11 aa, Artificial
  IGFBP-2 heparin binding domain-containing peptide sequence
KKRLGVNEPHK

SEQ ID NO: 4320 - protein, 11 aa, Artificial
  IGFBP-2 heparin binding domain-containing peptide sequence
RKRLGVNEPHK

SEQ ID NO: 4321 - protein, 11 aa, Artificial
  IGFBP-2 heparin binding domain-containing peptide sequence
HKRLGVNEPHK

SEQ ID NO: 4322 - protein, 11 aa, Artificial
  IGFBP-2 heparin binding domain-containing peptide sequence
KRRLGVNEPHK

SEQ ID NO: 4323 - protein, 11 aa, Artificial
  IGFBP-2 heparin binding domain-containing peptide sequence
RRRLGVNEPHK

SEQ ID NO: 4324 - protein, 11 aa, Artificial
  IGFBP-2 heparin binding domain-containing peptide sequence
HRRLGVNEPHK

SEQ ID NO: 4325 - protein, 11 aa, Artificial
  IGFBP-2 heparin binding domain-containing peptide sequence
KHHIGVNEPHK

SEQ ID NO: 4326 - protein, 11 aa, Artificial
  IGFBP-2 heparin binding domain-containing peptide sequence
RHHIGVNEPHK

SEQ ID NO: 4327 - protein, 11 aa, Artificial
  IGFBP-2 heparin binding domain-containing peptide sequence
HHHIGVNEPHK

SEQ ID NO: 4328 - protein, 11 aa, Artificial
  IGFBP-2 heparin binding domain-containing peptide sequence
KKHIGVNEPHK

SEQ ID NO: 4329 - protein, 11 aa, Artificial
  IGFBP-2 heparin binding domain-containing peptide sequence
RKHIGVNEPHK

SEQ ID NO: 4330 - protein, 11 aa, Artificial
  IGFBP-2 heparin binding domain-containing peptide sequence
HKHIGVNEPHK

SEQ ID NO: 4331 - protein, 11 aa, Artificial
  IGFBP-2 heparin binding domain-containing peptide sequence
KRHIGVNEPHK

SEQ ID NO: 4332 - protein, 11 aa, Artificial
  IGFBP-2 heparin binding domain-containing peptide sequence
RRHIGVNEPHK

SEQ ID NO: 4333 - protein, 11 aa, Artificial
  IGFBP-2 heparin binding domain-containing peptide sequence
HRHIGVNEPHK

SEQ ID NO: 4334 - protein, 11 aa, Artificial
  IGFBP-2 heparin binding domain-containing peptide sequence
KHKIGVNEPHK

SEQ ID NO: 4335 - protein, 11 aa, Artificial
  IGFBP-2 heparin binding domain-containing peptide sequence
RHKIGVNEPHK

SEQ ID NO: 4336 - protein, 11 aa, Artificial
  IGFBP-2 heparin binding domain-containing peptide sequence
HHKIGVNEPHK

SEQ ID NO: 4337 - protein, 11 aa, Artificial
  IGFBP-2 heparin binding domain-containing peptide sequence
KKKIGVNEPHK

SEQ ID NO: 4338 - protein, 11 aa, Artificial
  IGFBP-2 heparin binding domain-containing peptide sequence
RKKIGVNEPHK

SEQ ID NO: 4339 - protein, 11 aa, Artificial
  IGFBP-2 heparin binding domain-containing peptide sequence
HKKIGVNEPHK

SEQ ID NO: 4340 - protein, 11 aa, Artificial
  IGFBP-2 heparin binding domain-containing peptide sequence
KRKIGVNEPHK

SEQ ID NO: 4341 - protein, 11 aa, Artificial
  IGFBP-2 heparin binding domain-containing peptide sequence
RRKIGVNEPHK

SEQ ID NO: 4342 - protein, 11 aa, Artificial
  IGFBP-2 heparin binding domain-containing peptide sequence
HRKIGVNEPHK

SEQ ID NO: 4343 - protein, 11 aa, Artificial
  IGFBP-2 heparin binding domain-containing peptide sequence
KHRIGVNEPHK

SEQ ID NO: 4344 - protein, 11 aa, Artificial
  IGFBP-2 heparin binding domain-containing peptide sequence
RHRIGVNEPHK

SEQ ID NO: 4345 - protein, 11 aa, Artificial
  IGFBP-2 heparin binding domain-containing peptide sequence
HHRIGVNEPHK

SEQ ID NO: 4346 - protein, 11 aa, Artificial
  IGFBP-2 heparin binding domain-containing peptide sequence
KKRIGVNEPHK

SEQ ID NO: 4347 - protein, 11 aa, Artificial
  IGFBP-2 heparin binding domain-containing peptide sequence
RKRIGVNEPHK

SEQ ID NO: 4348 - protein, 11 aa, Artificial
  IGFBP-2 heparin binding domain-containing peptide sequence
HKRIGVNEPHK

SEQ ID NO: 4349 - protein, 11 aa, Artificial
  IGFBP-2 heparin binding domain-containing peptide sequence
KRRIGVNEPHK

SEQ ID NO: 4350 - protein, 11 aa, Artificial
  IGFBP-2 heparin binding domain-containing peptide sequence
RRRIGVNEPHK

SEQ ID NO: 4351 - protein, 11 aa, Artificial
  IGFBP-2 heparin binding domain-containing peptide sequence
HRRIGVNEPHK

SEQ ID NO: 4352 - protein, 11 aa, Artificial
  IGFBP-2 heparin binding domain-containing peptide sequence
KHHVGVNEPHK

SEQ ID NO: 4353 - protein, 11 aa, Artificial
  IGFBP-2 heparin binding domain-containing peptide sequence
RHHVGVNEPHK

SEQ ID NO: 4354 - protein, 11 aa, Artificial
  IGFBP-2 heparin binding domain-containing peptide sequence
HHHVGVNEPHK

SEQ ID NO: 4355 - protein, 11 aa, Artificial
  IGFBP-2 heparin binding domain-containing peptide sequence
KKHVGVNEPHK

SEQ ID NO: 4356 - protein, 11 aa, Artificial
  IGFBP-2 heparin binding domain-containing peptide sequence
RKHVGVNEPHK

SEQ ID NO: 4357 - protein, 11 aa, Artificial
  IGFBP-2 heparin binding domain-containing peptide sequence
HKHVGVNEPHK

SEQ ID NO: 4358 - protein, 11 aa, Artificial
  IGFBP-2 heparin binding domain-containing peptide sequence
KRHVGVNEPHK

SEQ ID NO: 4359 - protein, 11 aa, Artificial
  IGFBP-2 heparin binding domain-containing peptide sequence
RRHVGVNEPHK

SEQ ID NO: 4360 - protein, 11 aa, Artificial
  IGFBP-2 heparin binding domain-containing peptide sequence
HRHVGVNEPHK

SEQ ID NO: 4361 - protein, 11 aa, Artificial
  IGFBP-2 heparin binding domain-containing peptide sequence
KHKVGVNEPHK

SEQ ID NO: 4362 - protein, 11 aa, Artificial
  IGFBP-2 heparin binding domain-containing peptide sequence
RHKVGVNEPHK

SEQ ID NO: 4363 - protein, 11 aa, Artificial
  IGFBP-2 heparin binding domain-containing peptide sequence
HHKVGVNEPHK

SEQ ID NO: 4364 - protein, 11 aa, Artificial
  IGFBP-2 heparin binding domain-containing peptide sequence
KKKVGVNEPHK

SEQ ID NO: 4365 - protein, 11 aa, Artificial
  IGFBP-2 heparin binding domain-containing peptide sequence
RKKVGVNEPHK

SEQ ID NO: 4366 - protein, 11 aa, Artificial
  IGFBP-2 heparin binding domain-containing peptide sequence
HKKVGVNEPHK

SEQ ID NO: 4367 - protein, 11 aa, Artificial
  IGFBP-2 heparin binding domain-containing peptide sequence
KRKVGVNEPHK

SEQ ID NO: 4368 - protein, 11 aa, Artificial
  IGFBP-2 heparin binding domain-containing peptide sequence
RRKVGVNEPHK

SEQ ID NO: 4369 - protein, 11 aa, Artificial
  IGFBP-2 heparin binding domain-containing peptide sequence
HRKVGVNEPHK

SEQ ID NO: 4370 - protein, 11 aa, Artificial
  IGFBP-2 heparin binding domain-containing peptide sequence
KHRVGVNEPHK

SEQ ID NO: 4371 - protein, 11 aa, Artificial
  IGFBP-2 heparin binding domain-containing peptide sequence
RHRVGVNEPHK

SEQ ID NO: 4372 - protein, 11 aa, Artificial
  IGFBP-2 heparin binding domain-containing peptide sequence
HHRVGVNEPHK

SEQ ID NO: 4373 - protein, 11 aa, Artificial
  IGFBP-2 heparin binding domain-containing peptide sequence
KKRVGVNEPHK

SEQ ID NO: 4374 - protein, 11 aa, Artificial
  IGFBP-2 heparin binding domain-containing peptide sequence
RKRVGVNEPHK

SEQ ID NO: 4375 - protein, 11 aa, Artificial
  IGFBP-2 heparin binding domain-containing peptide sequence
HKRVGVNEPHK

SEQ ID NO: 4376 - protein, 11 aa, Artificial
  IGFBP-2 heparin binding domain-containing peptide sequence
KRRVGVNEPHK

SEQ ID NO: 4377 - protein, 11 aa, Artificial
  IGFBP-2 heparin binding domain-containing peptide sequence
RRRVGVNEPHK

SEQ ID NO: 4378 - protein, 11 aa, Artificial
  IGFBP-2 heparin binding domain-containing peptide sequence
HRRVGVNEPHK

SEQ ID NO: 4379 - protein, 11 aa, Artificial
  IGFBP-2 heparin binding domain-containing peptide sequence
KHHLGLENPHK

SEQ ID NO: 4380 - protein, 11 aa, Artificial
  IGFBP-2 heparin binding domain-containing peptide sequence
RHHLGLENPHK

SEQ ID NO: 4381 - protein, 11 aa, Artificial
  IGFBP-2 heparin binding domain-containing peptide sequence
HHHLGLENPHK

SEQ ID NO: 4382 - protein, 11 aa, Artificial
  IGFBP-2 heparin binding domain-containing peptide sequence
KKHLGLENPHK

SEQ ID NO: 4383 - protein, 11 aa, Artificial
  IGFBP-2 heparin binding domain-containing peptide sequence
RKHLGLENPHK

SEQ ID NO: 4384 - protein, 11 aa, Artificial
  IGFBP-2 heparin binding domain-containing peptide sequence
HKHLGLENPHK

SEQ ID NO: 4385 - protein, 11 aa, Artificial
  IGFBP-2 heparin binding domain-containing peptide sequence
KRHLGLENPHK

SEQ ID NO: 4386 - protein, 11 aa, Artificial
  IGFBP-2 heparin binding domain-containing peptide sequence
RRHLGLENPHK

SEQ ID NO: 4387 - protein, 11 aa, Artificial
  IGFBP-2 heparin binding domain-containing peptide sequence
HRHLGLENPHK

SEQ ID NO: 4388 - protein, 11 aa, Artificial
  IGFBP-2 heparin binding domain-containing peptide sequence
KHKLGLENPHK

SEQ ID NO: 4389 - protein, 11 aa, Artificial
  IGFBP-2 heparin binding domain-containing peptide sequence
RHKLGLENPHK

SEQ ID NO: 4390 - protein, 11 aa, Artificial
  IGFBP-2 heparin binding domain-containing peptide sequence
HHKLGLENPHK

SEQ ID NO: 4391 - protein, 11 aa, Artificial
  IGFBP-2 heparin binding domain-containing peptide sequence
KKKLGLENPHK

SEQ ID NO: 4392 - protein, 11 aa, Artificial
  IGFBP-2 heparin binding domain-containing peptide sequence
RKKLGLENPHK

SEQ ID NO: 4393 - protein, 11 aa, Artificial
  IGFBP-2 heparin binding domain-containing peptide sequence
HKKLGLENPHK

SEQ ID NO: 4394 - protein, 11 aa, Artificial
  IGFBP-2 heparin binding domain-containing peptide sequence
KRKLGLENPHK

SEQ ID NO: 4395 - protein, 11 aa, Artificial
  IGFBP-2 heparin binding domain-containing peptide sequence
RRKLGLENPHK

SEQ ID NO: 4396 - protein, 11 aa, Artificial
  IGFBP-2 heparin binding domain-containing peptide sequence
HRKLGLENPHK

SEQ ID NO: 4397 - protein, 11 aa, Artificial
  IGFBP-2 heparin binding domain-containing peptide sequence
KHRLGLENPHK

SEQ ID NO: 4398 - protein, 11 aa, Artificial
  IGFBP-2 heparin binding domain-containing peptide sequence
RHRLGLENPHK

SEQ ID NO: 4399 - protein, 11 aa, Artificial
  IGFBP-2 heparin binding domain-containing peptide sequence
HHRLGLENPHK

SEQ ID NO: 4400 - protein, 11 aa, Artificial
  IGFBP-2 heparin binding domain-containing peptide sequence
KKRLGLENPHK

SEQ ID NO: 4401 - protein, 11 aa, Artificial
  IGFBP-2 heparin binding domain-containing peptide sequence
RKRLGLENPHK

SEQ ID NO: 4402 - protein, 11 aa, Artificial
  IGFBP-2 heparin binding domain-containing peptide sequence
HKRLGLENPHK

SEQ ID NO: 4403 - protein, 11 aa, Artificial
  IGFBP-2 heparin binding domain-containing peptide sequence
KRRLGLENPHK

SEQ ID NO: 4404 - protein, 11 aa, Artificial
  IGFBP-2 heparin binding domain-containing peptide sequence
RRRLGLENPHK

SEQ ID NO: 4405 - protein, 11 aa, Artificial
  IGFBP-2 heparin binding domain-containing peptide sequence
HRRLGLENPHK

SEQ ID NO: 4406 - protein, 11 aa, Artificial
  IGFBP-2 heparin binding domain-containing peptide sequence
KHHIGLENPHK

SEQ ID NO: 4407 - protein, 11 aa, Artificial
  IGFBP-2 heparin binding domain-containing peptide sequence
RHHIGLENPHK

SEQ ID NO: 4408 - protein, 11 aa, Artificial
  IGFBP-2 heparin binding domain-containing peptide sequence
HHHIGLENPHK

SEQ ID NO: 4409 - protein, 11 aa, Artificial
  IGFBP-2 heparin binding domain-containing peptide sequence
KKHIGLENPHK

SEQ ID NO: 4410 - protein, 11 aa, Artificial
  IGFBP-2 heparin binding domain-containing peptide sequence
RKHIGLENPHK

SEQ ID NO: 4411 - protein, 11 aa, Artificial
  IGFBP-2 heparin binding domain-containing peptide sequence
HKHIGLENPHK

SEQ ID NO: 4412 - protein, 11 aa, Artificial
  IGFBP-2 heparin binding domain-containing peptide sequence
KRHIGLENPHK

SEQ ID NO: 4413 - protein, 11 aa, Artificial
  IGFBP-2 heparin binding domain-containing peptide sequence
RRHIGLENPHK

SEQ ID NO: 4414 - protein, 11 aa, Artificial
  IGFBP-2 heparin binding domain-containing peptide sequence
HRHIGLENPHK

SEQ ID NO: 4415 - protein, 11 aa, Artificial
  IGFBP-2 heparin binding domain-containing peptide sequence
KHKIGLENPHK

SEQ ID NO: 4416 - protein, 11 aa, Artificial
  IGFBP-2 heparin binding domain-containing peptide sequence
RHKIGLENPHK

SEQ ID NO: 4417 - protein, 11 aa, Artificial
  IGFBP-2 heparin binding domain-containing peptide sequence
HHKIGLENPHK

SEQ ID NO: 4418 - protein, 11 aa, Artificial
  IGFBP-2 heparin binding domain-containing peptide sequence
KKKIGLENPHK

SEQ ID NO: 4419 - protein, 11 aa, Artificial
  IGFBP-2 heparin binding domain-containing peptide sequence
RKKIGLENPHK

SEQ ID NO: 4420 - protein, 11 aa, Artificial
  IGFBP-2 heparin binding domain-containing peptide sequence
HKKIGLENPHK

SEQ ID NO: 4421 - protein, 11 aa, Artificial
  IGFBP-2 heparin binding domain-containing peptide sequence
KRKIGLENPHK

SEQ ID NO: 4422 - protein, 11 aa, Artificial
  IGFBP-2 heparin binding domain-containing peptide sequence
RRKIGLENPHK

SEQ ID NO: 4423 - protein, 11 aa, Artificial
  IGFBP-2 heparin binding domain-containing peptide sequence
HRKIGLENPHK

SEQ ID NO: 4424 - protein, 11 aa, Artificial
  IGFBP-2 heparin binding domain-containing peptide sequence
KHRIGLENPHK

SEQ ID NO: 4425 - protein, 11 aa, Artificial
  IGFBP-2 heparin binding domain-containing peptide sequence
RHRIGLENPHK

SEQ ID NO: 4426 - protein, 11 aa, Artificial
  IGFBP-2 heparin binding domain-containing peptide sequence
HHRIGLENPHK

SEQ ID NO: 4427 - protein, 11 aa, Artificial
  IGFBP-2 heparin binding domain-containing peptide sequence
KKRIGLENPHK

SEQ ID NO: 4428 - protein, 11 aa, Artificial
  IGFBP-2 heparin binding domain-containing peptide sequence
RKRIGLENPHK

SEQ ID NO: 4429 - protein, 11 aa, Artificial
  IGFBP-2 heparin binding domain-containing peptide sequence
HKRIGLENPHK

SEQ ID NO: 4430 - protein, 11 aa, Artificial
  IGFBP-2 heparin binding domain-containing peptide sequence
KRRIGLENPHK

SEQ ID NO: 4431 - protein, 11 aa, Artificial
  IGFBP-2 heparin binding domain-containing peptide sequence
RRRIGLENPHK

SEQ ID NO: 4432 - protein, 11 aa, Artificial
  IGFBP-2 heparin binding domain-containing peptide sequence
HRRIGLENPHK

SEQ ID NO: 4433 - protein, 11 aa, Artificial
  IGFBP-2 heparin binding domain-containing peptide sequence
KHHVGLENPHK

SEQ ID NO: 4434 - protein, 11 aa, Artificial
  IGFBP-2 heparin binding domain-containing peptide sequence
RHHVGLENPHK

SEQ ID NO: 4435 - protein, 11 aa, Artificial
  IGFBP-2 heparin binding domain-containing peptide sequence
HHHVGLENPHK

SEQ ID NO: 4436 - protein, 11 aa, Artificial
  IGFBP-2 heparin binding domain-containing peptide sequence
KKHVGLENPHK

SEQ ID NO: 4437 - protein, 11 aa, Artificial
  IGFBP-2 heparin binding domain-containing peptide sequence
RKHVGLENPHK

SEQ ID NO: 4438 - protein, 11 aa, Artificial
  IGFBP-2 heparin binding domain-containing peptide sequence
HKHVGLENPHK

SEQ ID NO: 4439 - protein, 11 aa, Artificial
  IGFBP-2 heparin binding domain-containing peptide sequence
KRHVGLENPHK

SEQ ID NO: 4440 - protein, 11 aa, Artificial
  IGFBP-2 heparin binding domain-containing peptide sequence
RRHVGLENPHK

SEQ ID NO: 4441 - protein, 11 aa, Artificial
  IGFBP-2 heparin binding domain-containing peptide sequence
HRHVGLENPHK

SEQ ID NO: 4442 - protein, 11 aa, Artificial
  IGFBP-2 heparin binding domain-containing peptide sequence
KHKVGLENPHK

SEQ ID NO: 4443 - protein, 11 aa, Artificial
  IGFBP-2 heparin binding domain-containing peptide sequence
RHKVGLENPHK

SEQ ID NO: 4444 - protein, 11 aa, Artificial
  IGFBP-2 heparin binding domain-containing peptide sequence
HHKVGLENPHK

SEQ ID NO: 4445 - protein, 11 aa, Artificial
  IGFBP-2 heparin binding domain-containing peptide sequence
KKKVGLENPHK

SEQ ID NO: 4446 - protein, 11 aa, Artificial
  IGFBP-2 heparin binding domain-containing peptide sequence
RKKVGLENPHK

SEQ ID NO: 4447 - protein, 11 aa, Artificial
  IGFBP-2 heparin binding domain-containing peptide sequence
HKKVGLENPHK

SEQ ID NO: 4448 - protein, 11 aa, Artificial
  IGFBP-2 heparin binding domain-containing peptide sequence
KRKVGLENPHK

SEQ ID NO: 4449 - protein, 11 aa, Artificial
  IGFBP-2 heparin binding domain-containing peptide sequence
RRKVGLENPHK

SEQ ID NO: 4450 - protein, 11 aa, Artificial
  IGFBP-2 heparin binding domain-containing peptide sequence
HRKVGLENPHK

SEQ ID NO: 4451 - protein, 11 aa, Artificial
  IGFBP-2 heparin binding domain-containing peptide sequence
KHRVGLENPHK

SEQ ID NO: 4452 - protein, 11 aa, Artificial
  IGFBP-2 heparin binding domain-containing peptide sequence
RHRVGLENPHK

SEQ ID NO: 4453 - protein, 11 aa, Artificial
  IGFBP-2 heparin binding domain-containing peptide sequence
HHRVGLENPHK

SEQ ID NO: 4454 - protein, 11 aa, Artificial
  IGFBP-2 heparin binding domain-containing peptide sequence
KKRVGLENPHK

SEQ ID NO: 4455 - protein, 11 aa, Artificial
  IGFBP-2 heparin binding domain-containing peptide sequence
RKRVGLENPHK

SEQ ID NO: 4456 - protein, 11 aa, Artificial
  IGFBP-2 heparin binding domain-containing peptide sequence
HKRVGLENPHK

SEQ ID NO: 4457 - protein, 11 aa, Artificial
  IGFBP-2 heparin binding domain-containing peptide sequence
KRRVGLENPHK

SEQ ID NO: 4458 - protein, 11 aa, Artificial
  IGFBP-2 heparin binding domain-containing peptide sequence
RRRVGLENPHK

SEQ ID NO: 4459 - protein, 11 aa, Artificial
  IGFBP-2 heparin binding domain-containing peptide sequence
HRRVGLENPHK

SEQ ID NO: 4460 - protein, 11 aa, Artificial
  IGFBP-2 heparin binding domain-containing peptide sequence
KHHLGIENPHK

SEQ ID NO: 4461 - protein, 11 aa, Artificial
  IGFBP-2 heparin binding domain-containing peptide sequence
RHHLGIENPHK

SEQ ID NO: 4462 - protein, 11 aa, Artificial
  IGFBP-2 heparin binding domain-containing peptide sequence
HHHLGIENPHK

SEQ ID NO: 4463 - protein, 11 aa, Artificial
  IGFBP-2 heparin binding domain-containing peptide sequence
KKHLGIENPHK

SEQ ID NO: 4464 - protein, 11 aa, Artificial
  IGFBP-2 heparin binding domain-containing peptide sequence
RKHLGIENPHK

SEQ ID NO: 4465 - protein, 11 aa, Artificial
  IGFBP-2 heparin binding domain-containing peptide sequence
HKHLGIENPHK

SEQ ID NO: 4466 - protein, 11 aa, Artificial
  IGFBP-2 heparin binding domain-containing peptide sequence
KRHLGIENPHK

SEQ ID NO: 4467 - protein, 11 aa, Artificial
  IGFBP-2 heparin binding domain-containing peptide sequence
RRHLGIENPHK

SEQ ID NO: 4468 - protein, 11 aa, Artificial
  IGFBP-2 heparin binding domain-containing peptide sequence
HRHLGIENPHK

SEQ ID NO: 4469 - protein, 11 aa, Artificial
  IGFBP-2 heparin binding domain-containing peptide sequence
KHKLGIENPHK

SEQ ID NO: 4470 - protein, 11 aa, Artificial
  IGFBP-2 heparin binding domain-containing peptide sequence
RHKLGIENPHK

SEQ ID NO: 4471 - protein, 11 aa, Artificial
  IGFBP-2 heparin binding domain-containing peptide sequence
HHKLGIENPHK

SEQ ID NO: 4472 - protein, 11 aa, Artificial
  IGFBP-2 heparin binding domain-containing peptide sequence
KKKLGIENPHK

SEQ ID NO: 4473 - protein, 11 aa, Artificial
  IGFBP-2 heparin binding domain-containing peptide sequence
RKKLGIENPHK

SEQ ID NO: 4474 - protein, 11 aa, Artificial
  IGFBP-2 heparin binding domain-containing peptide sequence
HKKLGIENPHK

SEQ ID NO: 4475 - protein, 11 aa, Artificial
  IGFBP-2 heparin binding domain-containing peptide sequence
KRKLGIENPHK

SEQ ID NO: 4476 - protein, 11 aa, Artificial
  IGFBP-2 heparin binding domain-containing peptide sequence
RRKLGIENPHK

SEQ ID NO: 4477 - protein, 11 aa, Artificial
  IGFBP-2 heparin binding domain-containing peptide sequence
HRKLGIENPHK

SEQ ID NO: 4478 - protein, 11 aa, Artificial
  IGFBP-2 heparin binding domain-containing peptide sequence
KHRLGIENPHK

SEQ ID NO: 4479 - protein, 11 aa, Artificial
  IGFBP-2 heparin binding domain-containing peptide sequence
RHRLGIENPHK

SEQ ID NO: 4480 - protein, 11 aa, Artificial
  IGFBP-2 heparin binding domain-containing peptide sequence
HHRLGIENPHK

SEQ ID NO: 4481 - protein, 11 aa, Artificial
  IGFBP-2 heparin binding domain-containing peptide sequence
KKRLGIENPHK

SEQ ID NO: 4482 - protein, 11 aa, Artificial
  IGFBP-2 heparin binding domain-containing peptide sequence
RKRLGIENPHK

SEQ ID NO: 4483 - protein, 11 aa, Artificial
  IGFBP-2 heparin binding domain-containing peptide sequence
HKRLGIENPHK

SEQ ID NO: 4484 - protein, 11 aa, Artificial
  IGFBP-2 heparin binding domain-containing peptide sequence
KRRLGIENPHK

SEQ ID NO: 4485 - protein, 11 aa, Artificial
  IGFBP-2 heparin binding domain-containing peptide sequence
RRRLGIENPHK

SEQ ID NO: 4486 - protein, 11 aa, Artificial
  IGFBP-2 heparin binding domain-containing peptide sequence
HRRLGIENPHK

SEQ ID NO: 4487 - protein, 11 aa, Artificial
  IGFBP-2 heparin binding domain-containing peptide sequence
KHHIGIENPHK

SEQ ID NO: 4488 - protein, 11 aa, Artificial
  IGFBP-2 heparin binding domain-containing peptide sequence
RHHIGIENPHK

SEQ ID NO: 4489 - protein, 11 aa, Artificial
  IGFBP-2 heparin binding domain-containing peptide sequence
HHHIGIENPHK

SEQ ID NO: 4490 - protein, 11 aa, Artificial
  IGFBP-2 heparin binding domain-containing peptide sequence
KKHIGIENPHK

SEQ ID NO: 4491 - protein, 11 aa, Artificial
  IGFBP-2 heparin binding domain-containing peptide sequence
RKHIGIENPHK

SEQ ID NO: 4492 - protein, 11 aa, Artificial
  IGFBP-2 heparin binding domain-containing peptide sequence
HKHIGIENPHK

SEQ ID NO: 4493 - protein, 11 aa, Artificial
  IGFBP-2 heparin binding domain-containing peptide sequence
KRHIGIENPHK

SEQ ID NO: 4494 - protein, 11 aa, Artificial
  IGFBP-2 heparin binding domain-containing peptide sequence
RRHIGIENPHK

SEQ ID NO: 4495 - protein, 11 aa, Artificial
  IGFBP-2 heparin binding domain-containing peptide sequence
HRHIGIENPHK

SEQ ID NO: 4496 - protein, 11 aa, Artificial
  IGFBP-2 heparin binding domain-containing peptide sequence
KHKIGIENPHK

SEQ ID NO: 4497 - protein, 11 aa, Artificial
  IGFBP-2 heparin binding domain-containing peptide sequence
RHKIGIENPHK

SEQ ID NO: 4498 - protein, 11 aa, Artificial
  IGFBP-2 heparin binding domain-containing peptide sequence
HHKIGIENPHK

SEQ ID NO: 4499 - protein, 11 aa, Artificial
  IGFBP-2 heparin binding domain-containing peptide sequence
KKKIGIENPHK

SEQ ID NO: 4500 - protein, 11 aa, Artificial
  IGFBP-2 heparin binding domain-containing peptide sequence
RKKIGIENPHK

SEQ ID NO: 4501 - protein, 11 aa, Artificial
  IGFBP-2 heparin binding domain-containing peptide sequence
HKKIGIENPHK

SEQ ID NO: 4502 - protein, 11 aa, Artificial
  IGFBP-2 heparin binding domain-containing peptide sequence
KRKIGIENPHK

SEQ ID NO: 4503 - protein, 11 aa, Artificial
  IGFBP-2 heparin binding domain-containing peptide sequence
RRKIGIENPHK

SEQ ID NO: 4504 - protein, 11 aa, Artificial
  IGFBP-2 heparin binding domain-containing peptide sequence
HRKIGIENPHK

SEQ ID NO: 4505 - protein, 11 aa, Artificial
  IGFBP-2 heparin binding domain-containing peptide sequence
KHRIGIENPHK

SEQ ID NO: 4506 - protein, 11 aa, Artificial
  IGFBP-2 heparin binding domain-containing peptide sequence
RHRIGIENPHK

SEQ ID NO: 4507 - protein, 11 aa, Artificial
  IGFBP-2 heparin binding domain-containing peptide sequence
HHRIGIENPHK

SEQ ID NO: 4508 - protein, 11 aa, Artificial
  IGFBP-2 heparin binding domain-containing peptide sequence
KKRIGIENPHK

SEQ ID NO: 4509 - protein, 11 aa, Artificial
  IGFBP-2 heparin binding domain-containing peptide sequence
RKRIGIENPHK

SEQ ID NO: 4510 - protein, 11 aa, Artificial
  IGFBP-2 heparin binding domain-containing peptide sequence
HKRIGIENPHK

SEQ ID NO: 4511 - protein, 11 aa, Artificial
  IGFBP-2 heparin binding domain-containing peptide sequence
KRRIGIENPHK

SEQ ID NO: 4512 - protein, 11 aa, Artificial
  IGFBP-2 heparin binding domain-containing peptide sequence
RRRIGIENPHK

SEQ ID NO: 4513 - protein, 11 aa, Artificial
  IGFBP-2 heparin binding domain-containing peptide sequence
HRRIGIENPHK

SEQ ID NO: 4514 - protein, 11 aa, Artificial
  IGFBP-2 heparin binding domain-containing peptide sequence
KHHVGIENPHK

SEQ ID NO: 4515 - protein, 11 aa, Artificial
  IGFBP-2 heparin binding domain-containing peptide sequence
RHHVGIENPHK

SEQ ID NO: 4516 - protein, 11 aa, Artificial
  IGFBP-2 heparin binding domain-containing peptide sequence
HHHVGIENPHK

SEQ ID NO: 4517 - protein, 11 aa, Artificial
  IGFBP-2 heparin binding domain-containing peptide sequence
KKHVGIENPHK

SEQ ID NO: 4518 - protein, 11 aa, Artificial
  IGFBP-2 heparin binding domain-containing peptide sequence
RKHVGIENPHK

SEQ ID NO: 4519 - protein, 11 aa, Artificial
  IGFBP-2 heparin binding domain-containing peptide sequence
HKHVGIENPHK

SEQ ID NO: 4520 - protein, 11 aa, Artificial
  IGFBP-2 heparin binding domain-containing peptide sequence
KRHVGIENPHK

SEQ ID NO: 4521 - protein, 11 aa, Artificial
  IGFBP-2 heparin binding domain-containing peptide sequence
RRHVGIENPHK

SEQ ID NO: 4522 - protein, 11 aa, Artificial
  IGFBP-2 heparin binding domain-containing peptide sequence
HRHVGIENPHK

SEQ ID NO: 4523 - protein, 11 aa, Artificial
  IGFBP-2 heparin binding domain-containing peptide sequence
KHKVGIENPHK

SEQ ID NO: 4524 - protein, 11 aa, Artificial
  IGFBP-2 heparin binding domain-containing peptide sequence
RHKVGIENPHK

SEQ ID NO: 4525 - protein, 11 aa, Artificial
  IGFBP-2 heparin binding domain-containing peptide sequence
HHKVGIENPHK

SEQ ID NO: 4526 - protein, 11 aa, Artificial
  IGFBP-2 heparin binding domain-containing peptide sequence
KKKVGIENPHK

SEQ ID NO: 4527 - protein, 11 aa, Artificial
  IGFBP-2 heparin binding domain-containing peptide sequence
RKKVGIENPHK

SEQ ID NO: 4528 - protein, 11 aa, Artificial
  IGFBP-2 heparin binding domain-containing peptide sequence
HKKVGIENPHK

SEQ ID NO: 4529 - protein, 11 aa, Artificial
  IGFBP-2 heparin binding domain-containing peptide sequence
KRKVGIENPHK

SEQ ID NO: 4530 - protein, 11 aa, Artificial
  IGFBP-2 heparin binding domain-containing peptide sequence
RRKVGIENPHK

SEQ ID NO: 4531 - protein, 11 aa, Artificial
  IGFBP-2 heparin binding domain-containing peptide sequence
HRKVGIENPHK

SEQ ID NO: 4532 - protein, 11 aa, Artificial
  IGFBP-2 heparin binding domain-containing peptide sequence
KHRVGIENPHK

SEQ ID NO: 4533 - protein, 11 aa, Artificial
  IGFBP-2 heparin binding domain-containing peptide sequence
RHRVGIENPHK

SEQ ID NO: 4534 - protein, 11 aa, Artificial
  IGFBP-2 heparin binding domain-containing peptide sequence
HHRVGIENPHK

SEQ ID NO: 4535 - protein, 11 aa, Artificial
  IGFBP-2 heparin binding domain-containing peptide sequence
KKRVGIENPHK

SEQ ID NO: 4536 - protein, 11 aa, Artificial
  IGFBP-2 heparin binding domain-containing peptide sequence
RKRVGIENPHK

SEQ ID NO: 4537 - protein, 11 aa, Artificial
  IGFBP-2 heparin binding domain-containing peptide sequence
HKRVGIENPHK

SEQ ID NO: 4538 - protein, 11 aa, Artificial
  IGFBP-2 heparin binding domain-containing peptide sequence
KRRVGIENPHK

SEQ ID NO: 4539 - protein, 11 aa, Artificial
  IGFBP-2 heparin binding domain-containing peptide sequence
RRRVGIENPHK

SEQ ID NO: 4540 - protein, 11 aa, Artificial
  IGFBP-2 heparin binding domain-containing peptide sequence
HRRVGIENPHK

SEQ ID NO: 4541 - protein, 11 aa, Artificial
  IGFBP-2 heparin binding domain-containing peptide sequence
KHHLGVENPHK

SEQ ID NO: 4542 - protein, 11 aa, Artificial
  IGFBP-2 heparin binding domain-containing peptide sequence
RHHLGVENPHK

SEQ ID NO: 4543 - protein, 11 aa, Artificial
  IGFBP-2 heparin binding domain-containing peptide sequence
HHHLGVENPHK

SEQ ID NO: 4544 - protein, 11 aa, Artificial
  IGFBP-2 heparin binding domain-containing peptide sequence
KKHLGVENPHK

SEQ ID NO: 4545 - protein, 11 aa, Artificial
  IGFBP-2 heparin binding domain-containing peptide sequence
RKHLGVENPHK

SEQ ID NO: 4546 - protein, 11 aa, Artificial
  IGFBP-2 heparin binding domain-containing peptide sequence
HKHLGVENPHK

SEQ ID NO: 4547 - protein, 11 aa, Artificial
  IGFBP-2 heparin binding domain-containing peptide sequence
KRHLGVENPHK

SEQ ID NO: 4548 - protein, 11 aa, Artificial
  IGFBP-2 heparin binding domain-containing peptide sequence
RRHLGVENPHK

SEQ ID NO: 4549 - protein, 11 aa, Artificial
  IGFBP-2 heparin binding domain-containing peptide sequence
HRHLGVENPHK

SEQ ID NO: 4550 - protein, 11 aa, Artificial
  IGFBP-2 heparin binding domain-containing peptide sequence
KHKLGVENPHK

SEQ ID NO: 4551 - protein, 11 aa, Artificial
  IGFBP-2 heparin binding domain-containing peptide sequence
RHKLGVENPHK

SEQ ID NO: 4552 - protein, 11 aa, Artificial
  IGFBP-2 heparin binding domain-containing peptide sequence
HHKLGVENPHK

SEQ ID NO: 4553 - protein, 11 aa, Artificial
  IGFBP-2 heparin binding domain-containing peptide sequence
KKKLGVENPHK

SEQ ID NO: 4554 - protein, 11 aa, Artificial
  IGFBP-2 heparin binding domain-containing peptide sequence
RKKLGVENPHK

SEQ ID NO: 4555 - protein, 11 aa, Artificial
  IGFBP-2 heparin binding domain-containing peptide sequence
HKKLGVENPHK

SEQ ID NO: 4556 - protein, 11 aa, Artificial
  IGFBP-2 heparin binding domain-containing peptide sequence
KRKLGVENPHK

SEQ ID NO: 4557 - protein, 11 aa, Artificial
  IGFBP-2 heparin binding domain-containing peptide sequence
RRKLGVENPHK

SEQ ID NO: 4558 - protein, 11 aa, Artificial
  IGFBP-2 heparin binding domain-containing peptide sequence
HRKLGVENPHK

SEQ ID NO: 4559 - protein, 11 aa, Artificial
  IGFBP-2 heparin binding domain-containing peptide sequence
KHRLGVENPHK

SEQ ID NO: 4560 - protein, 11 aa, Artificial
  IGFBP-2 heparin binding domain-containing peptide sequence
RHRLGVENPHK

SEQ ID NO: 4561 - protein, 11 aa, Artificial
  IGFBP-2 heparin binding domain-containing peptide sequence
HHRLGVENPHK

SEQ ID NO: 4562 - protein, 11 aa, Artificial
  IGFBP-2 heparin binding domain-containing peptide sequence
KKRLGVENPHK

SEQ ID NO: 4563 - protein, 11 aa, Artificial
  IGFBP-2 heparin binding domain-containing peptide sequence
RKRLGVENPHK

SEQ ID NO: 4564 - protein, 11 aa, Artificial
  IGFBP-2 heparin binding domain-containing peptide sequence
HKRLGVENPHK

SEQ ID NO: 4565 - protein, 11 aa, Artificial
  IGFBP-2 heparin binding domain-containing peptide sequence
KRRLGVENPHK

SEQ ID NO: 4566 - protein, 11 aa, Artificial
  IGFBP-2 heparin binding domain-containing peptide sequence
RRRLGVENPHK

SEQ ID NO: 4567 - protein, 11 aa, Artificial
  IGFBP-2 heparin binding domain-containing peptide sequence
HRRLGVENPHK

SEQ ID NO: 4568 - protein, 11 aa, Artificial
  IGFBP-2 heparin binding domain-containing peptide sequence
KHHIGVENPHK

SEQ ID NO: 4569 - protein, 11 aa, Artificial
  IGFBP-2 heparin binding domain-containing peptide sequence
RHHIGVEEPHK

SEQ ID NO: 4570 - protein, 11 aa, Artificial
  IGFBP-2 heparin binding domain-containing peptide sequence
HHHIGVENPHK

SEQ ID NO: 4571 - protein, 11 aa, Artificial
  IGFBP-2 heparin binding domain-containing peptide sequence
KKHIGVENPHK

SEQ ID NO: 4572 - protein, 11 aa, Artificial
  IGFBP-2 heparin binding domain-containing peptide sequence
RKHIGVENPHK

SEQ ID NO: 4573 - protein, 11 aa, Artificial
  IGFBP-2 heparin binding domain-containing peptide sequence
HKHIGVENPHK

SEQ ID NO: 4574 - protein, 11 aa, Artificial
  IGFBP-2 heparin binding domain-containing peptide sequence
KRHIGVENPHK

SEQ ID NO: 4575 - protein, 11 aa, Artificial
  IGFBP-2 heparin binding domain-containing peptide sequence
RRHIGVENPHK

SEQ ID NO: 4576 - protein, 11 aa, Artificial
  IGFBP-2 heparin binding domain-containing peptide sequence
HRHIGVENPHK

SEQ ID NO: 4577 - protein, 11 aa, Artificial
  IGFBP-2 heparin binding domain-containing peptide sequence
KHKIGVENPHK

SEQ ID NO: 4578 - protein, 11 aa, Artificial
  IGFBP-2 heparin binding domain-containing peptide sequence
RHKIGVENPHK

SEQ ID NO: 4579 - protein, 11 aa, Artificial
  IGFBP-2 heparin binding domain-containing peptide sequence
HHKIGVENPHK

SEQ ID NO: 4580 - protein, 11 aa, Artificial
  IGFBP-2 heparin binding domain-containing peptide sequence
KKKIGVENPHK

SEQ ID NO: 4581 - protein, 11 aa, Artificial
  IGFBP-2 heparin binding domain-containing peptide sequence
RKKIGVENPHK

SEQ ID NO: 4582 - protein, 11 aa, Artificial
  IGFBP-2 heparin binding domain-containing peptide sequence
HKKIGVENPHK

SEQ ID NO: 4583 - protein, 11 aa, Artificial
  IGFBP-2 heparin binding domain-containing peptide sequence
KRKIGVENPHK

SEQ ID NO: 4584 - protein, 11 aa, Artificial
  IGFBP-2 heparin binding domain-containing peptide sequence
RRKIGVENPHK

SEQ ID NO: 4585 - protein, 11 aa, Artificial
  IGFBP-2 heparin binding domain-containing peptide sequence
HRKIGVENPHK

SEQ ID NO: 4586 - protein, 11 aa, Artificial
  IGFBP-2 heparin binding domain-containing peptide sequence
KHRIGVENPHK

SEQ ID NO: 4587 - protein, 11 aa, Artificial
  IGFBP-2 heparin binding domain-containing peptide sequence
RHRIGVENPHK

SEQ ID NO: 4588 - protein, 11 aa, Artificial
  IGFBP-2 heparin binding domain-containing peptide sequence
HHRIGVENPHK

SEQ ID NO: 4589 - protein, 11 aa, Artificial
  IGFBP-2 heparin binding domain-containing peptide sequence
KKRIGVENPHK

SEQ ID NO: 4590 - protein, 11 aa, Artificial
  IGFBP-2 heparin binding domain-containing peptide sequence
RKRIGVENPHK

SEQ ID NO: 4591 - protein, 11 aa, Artificial
  IGFBP-2 heparin binding domain-containing peptide sequence
HKRIGVENPHK

SEQ ID NO: 4592 - protein, 11 aa, Artificial
  IGFBP-2 heparin binding domain-containing peptide sequence
KRRIGVENPHK

SEQ ID NO: 4593 - protein, 11 aa, Artificial
  IGFBP-2 heparin binding domain-containing peptide sequence
RRRIGVENPHK

SEQ ID NO: 4594 - protein, 11 aa, Artificial
  IGFBP-2 heparin binding domain-containing peptide sequence
HRRIGVENPHK

SEQ ID NO: 4595 - protein, 11 aa, Artificial
  IGFBP-2 heparin binding domain-containing peptide sequence
KHHVGVENPHK

SEQ ID NO: 4596 - protein, 11 aa, Artificial
  IGFBP-2 heparin binding domain-containing peptide sequence
RHHVGVENPHK

SEQ ID NO: 4597 - protein, 11 aa, Artificial
  IGFBP-2 heparin binding domain-containing peptide sequence
HHHVGVENPHK

SEQ ID NO: 4598 - protein, 11 aa, Artificial
  IGFBP-2 heparin binding domain-containing peptide sequence
KKHVGVENPHK

SEQ ID NO: 4599 - protein, 11 aa, Artificial
  IGFBP-2 heparin binding domain-containing peptide sequence
RKHVGVENPHK

SEQ ID NO: 4600 - protein, 11 aa, Artificial
  IGFBP-2 heparin binding domain-containing peptide sequence
HKHVGVENPHK

SEQ ID NO: 4601 - protein, 11 aa, Artificial
  IGFBP-2 heparin binding domain-containing peptide sequence
KRHVGVENPHK

SEQ ID NO: 4602 - protein, 11 aa, Artificial
  IGFBP-2 heparin binding domain-containing peptide sequence
RRHVGVENPHK

SEQ ID NO: 4603 - protein, 11 aa, Artificial
  IGFBP-2 heparin binding domain-containing peptide sequence
HRHVGVENPHK

SEQ ID NO: 4604 - protein, 11 aa, Artificial
  IGFBP-2 heparin binding domain-containing peptide sequence
KHKVGVENPHK

SEQ ID NO: 4605 - protein, 11 aa, Artificial
  IGFBP-2 heparin binding domain-containing peptide sequence
RHKVGVENPHK

SEQ ID NO: 4606 - protein, 11 aa, Artificial
  IGFBP-2 heparin binding domain-containing peptide sequence
HHKVGVENPHK

SEQ ID NO: 4607 - protein, 11 aa, Artificial
  IGFBP-2 heparin binding domain-containing peptide sequence
KKKVGVENPHK

SEQ ID NO: 4608 - protein, 11 aa, Artificial
  IGFBP-2 heparin binding domain-containing peptide sequence
RKKVGVENPHK

SEQ ID NO: 4609 - protein, 11 aa, Artificial
  IGFBP-2 heparin binding domain-containing peptide sequence
HKKVGVENPHK

SEQ ID NO: 4610 - protein, 11 aa, Artificial
  IGFBP-2 heparin binding domain-containing peptide sequence
KRKVGVENPHK

SEQ ID NO: 4611 - protein, 11 aa, Artificial
  IGFBP-2 heparin binding domain-containing peptide sequence
RRKVGVEEPHK

SEQ ID NO: 4612 - protein, 11 aa, Artificial
  IGFBP-2 heparin binding domain-containing peptide sequence
HRKVGVENPHK

SEQ ID NO: 4613 - protein, 11 aa, Artificial
  IGFBP-2 heparin binding domain-containing peptide sequence
KHRVGVENPHK

SEQ ID NO: 4614 - protein, 11 aa, Artificial
  IGFBP-2 heparin binding domain-containing peptide sequence
RHRVGVENPHK

SEQ ID NO: 4615 - protein, 11 aa, Artificial
  IGFBP-2 heparin binding domain-containing peptide sequence
HHRVGVENPHK

SEQ ID NO: 4616 - protein, 11 aa, Artificial
  IGFBP-2 heparin binding domain-containing peptide sequence
KKRVGVENPHK

SEQ ID NO: 4617 - protein, 11 aa, Artificial
  IGFBP-2 heparin binding domain-containing peptide sequence
RKRVGVENPHK

SEQ ID NO: 4618 - protein, 11 aa, Artificial
  IGFBP-2 heparin binding domain-containing peptide sequence
HKRVGVENPHK

SEQ ID NO: 4619 - protein, 11 aa, Artificial
  IGFBP-2 heparin binding domain-containing peptide sequence
KRRVGVENPHK

SEQ ID NO: 4620 - protein, 11 aa, Artificial
  IGFBP-2 heparin binding domain-containing peptide sequence
RRRVGVENPHK

SEQ ID NO: 4621 - protein, 11 aa, Artificial
  IGFBP-2 heparin binding domain-containing peptide sequence
HRRVGVENPHK

SEQ ID NO: 4622 - protein, 11 aa, Artificial
  IGFBP-2 heparin binding domain-containing peptide sequence
KHHLGLNNPHK

SEQ ID NO: 4623 - protein, 11 aa, Artificial
  IGFBP-2 heparin binding domain-containing peptide sequence
RHHLGLNNPHK

SEQ ID NO: 4624 - protein, 11 aa, Artificial
  IGFBP-2 heparin binding domain-containing peptide sequence
HHHLGLNNPHK

SEQ ID NO: 4625 - protein, 11 aa, Artificial
  IGFBP-2 heparin binding domain-containing peptide sequence
KKHLGLNNPHK

SEQ ID NO: 4626 - protein, 11 aa, Artificial
  IGFBP-2 heparin binding domain-containing peptide sequence
RKHLGLNNPHK

SEQ ID NO: 4627 - protein, 11 aa, Artificial
  IGFBP-2 heparin binding domain-containing peptide sequence
HKHLGLNNPHK

SEQ ID NO: 4628 - protein, 11 aa, Artificial
  IGFBP-2 heparin binding domain-containing peptide sequence
KRHLGLNNPHK

SEQ ID NO: 4629 - protein, 11 aa, Artificial
  IGFBP-2 heparin binding domain-containing peptide sequence
RRHLGLNNPHK

SEQ ID NO: 4630 - protein, 11 aa, Artificial
  IGFBP-2 heparin binding domain-containing peptide sequence
HRHLGLNNPHK

SEQ ID NO: 4631 - protein, 11 aa, Artificial
  IGFBP-2 heparin binding domain-containing peptide sequence
KHKLGLNNPHK

SEQ ID NO: 4632 - protein, 11 aa, Artificial
  IGFBP-2 heparin binding domain-containing peptide sequence
RHKLGLNNPHK

SEQ ID NO: 4633 - protein, 11 aa, Artificial
  IGFBP-2 heparin binding domain-containing peptide sequence
HHKLGLNNPHK

SEQ ID NO: 4634 - protein, 11 aa, Artificial
  IGFBP-2 heparin binding domain-containing peptide sequence
KKKLGLNNPHK

SEQ ID NO: 4635 - protein, 11 aa, Artificial
  IGFBP-2 heparin binding domain-containing peptide sequence
RKKLGLNNPHK

SEQ ID NO: 4636 - protein, 11 aa, Artificial
  IGFBP-2 heparin binding domain-containing peptide sequence
HKKLGLNNPHK

SEQ ID NO: 4637 - protein, 11 aa, Artificial
  IGFBP-2 heparin binding domain-containing peptide sequence
KRKLGLNNPHK

SEQ ID NO: 4638 - protein, 11 aa, Artificial
  IGFBP-2 heparin binding domain-containing peptide sequence
RRKLGLNNPHK

SEQ ID NO: 4639 - protein, 11 aa, Artificial
  IGFBP-2 heparin binding domain-containing peptide sequence
HRKLGLNNPHK

SEQ ID NO: 4640 - protein, 11 aa, Artificial
  IGFBP-2 heparin binding domain-containing peptide sequence
KHRLGLNNPHK

SEQ ID NO: 4641 - protein, 11 aa, Artificial
  IGFBP-2 heparin binding domain-containing peptide sequence
RHRLGLNNPHK

SEQ ID NO: 4642 - protein, 11 aa, Artificial
  IGFBP-2 heparin binding domain-containing peptide sequence
HHRLGLNNPHK

SEQ ID NO: 4643 - protein, 11 aa, Artificial
  IGFBP-2 heparin binding domain-containing peptide sequence
KKRLGLNNPHK

SEQ ID NO: 4644 - protein, 11 aa, Artificial
  IGFBP-2 heparin binding domain-containing peptide sequence
RKRLGLNNPHK

SEQ ID NO: 4645 - protein, 11 aa, Artificial
  IGFBP-2 heparin binding domain-containing peptide sequence
HKRLGLNNPHK

SEQ ID NO: 4646 - protein, 11 aa, Artificial
  IGFBP-2 heparin binding domain-containing peptide sequence
KRRLGLNNPHK

SEQ ID NO: 4647 - protein, 11 aa, Artificial
  IGFBP-2 heparin binding domain-containing peptide sequence
RRRLGLNNPHK

SEQ ID NO: 4648 - protein, 11 aa, Artificial
  IGFBP-2 heparin binding domain-containing peptide sequence
HRRLGLNNPHK

SEQ ID NO: 4649 - protein, 11 aa, Artificial
  IGFBP-2 heparin binding domain-containing peptide sequence
KHHIGLNNPHK

SEQ ID NO: 4650 - protein, 11 aa, Artificial
  IGFBP-2 heparin binding domain-containing peptide sequence
RHHIGLNNPHK

SEQ ID NO: 4651 - protein, 11 aa, Artificial
  IGFBP-2 heparin binding domain-containing peptide sequence
HHHIGLNNPHK

SEQ ID NO: 4652 - protein, 11 aa, Artificial
  IGFBP-2 heparin binding domain-containing peptide sequence
KKHIGLNNPHK

SEQ ID NO: 4653 - protein, 11 aa, Artificial
  IGFBP-2 heparin binding domain-containing peptide sequence
RKHIGLNNPHK

SEQ ID NO: 4654 - protein, 11 aa, Artificial
  IGFBP-2 heparin binding domain-containing peptide sequence
HKHIGLNNPHK

SEQ ID NO: 4655 - protein, 11 aa, Artificial
  IGFBP-2 heparin binding domain-containing peptide sequence
KRHIGLNNPHK

SEQ ID NO: 4656 - protein, 11 aa, Artificial
  IGFBP-2 heparin binding domain-containing peptide sequence
RRHIGLNNPHK

SEQ ID NO: 4657 - protein, 11 aa, Artificial
  IGFBP-2 heparin binding domain-containing peptide sequence
HRHIGLNNPHK

SEQ ID NO: 4658 - protein, 11 aa, Artificial
  IGFBP-2 heparin binding domain-containing peptide sequence
KHKIGLNNPHK

SEQ ID NO: 4659 - protein, 11 aa, Artificial
  IGFBP-2 heparin binding domain-containing peptide sequence
RHKIGLNNPHK

SEQ ID NO: 4660 - protein, 11 aa, Artificial
  IGFBP-2 heparin binding domain-containing peptide sequence
HHKIGLNNPHK

SEQ ID NO: 4661 - protein, 11 aa, Artificial
  IGFBP-2 heparin binding domain-containing peptide sequence
KKKIGLNNPHK

SEQ ID NO: 4662 - protein, 11 aa, Artificial
  IGFBP-2 heparin binding domain-containing peptide sequence
RKKIGLNNPHK

SEQ ID NO: 4663 - protein, 11 aa, Artificial
  IGFBP-2 heparin binding domain-containing peptide sequence
HKKIGLNNPHK

SEQ ID NO: 4664 - protein, 11 aa, Artificial
  IGFBP-2 heparin binding domain-containing peptide sequence
KRKIGLNNPHK

SEQ ID NO: 4665 - protein, 11 aa, Artificial
  IGFBP-2 heparin binding domain-containing peptide sequence
RRKIGLNNPHK

SEQ ID NO: 4666 - protein, 11 aa, Artificial
  IGFBP-2 heparin binding domain-containing peptide sequence
HRKIGLNNPHK

SEQ ID NO: 4667 - protein, 11 aa, Artificial
  IGFBP-2 heparin binding domain-containing peptide sequence
KHRIGLNNPHK

SEQ ID NO: 4668 - protein, 11 aa, Artificial
  IGFBP-2 heparin binding domain-containing peptide sequence
RHRIGLNNPHK

SEQ ID NO: 4669 - protein, 11 aa, Artificial
  IGFBP-2 heparin binding domain-containing peptide sequence
HHRIGLNNPHK

SEQ ID NO: 4670 - protein, 11 aa, Artificial
  IGFBP-2 heparin binding domain-containing peptide sequence
KKRIGLNNPHK

SEQ ID NO: 4671 - protein, 11 aa, Artificial
  IGFBP-2 heparin binding domain-containing peptide sequence
RKRIGLNNPHK

SEQ ID NO: 4672 - protein, 11 aa, Artificial
  IGFBP-2 heparin binding domain-containing peptide sequence
HKRIGLNNPHK

SEQ ID NO: 4673 - protein, 11 aa, Artificial
  IGFBP-2 heparin binding domain-containing peptide sequence
KRRIGLNNPHK

SEQ ID NO: 4674 - protein, 11 aa, Artificial
  IGFBP-2 heparin binding domain-containing peptide sequence
RRRIGLNNPHK

SEQ ID NO: 4675 - protein, 11 aa, Artificial
  IGFBP-2 heparin binding domain-containing peptide sequence
HRRIGLNNPHK

SEQ ID NO: 4676 - protein, 11 aa, Artificial
  IGFBP-2 heparin binding domain-containing peptide sequence
KHHVGLNNPHK

SEQ ID NO: 4677 - protein, 11 aa, Artificial
  IGFBP-2 heparin binding domain-containing peptide sequence
RHHVGLNNPHK

SEQ ID NO: 4678 - protein, 11 aa, Artificial
  IGFBP-2 heparin binding domain-containing peptide sequence
HHHVGLNNPHK

SEQ ID NO: 4679 - protein, 11 aa, Artificial
  IGFBP-2 heparin binding domain-containing peptide sequence
KKHVGLNNPHK

SEQ ID NO: 4680 - protein, 11 aa, Artificial
  IGFBP-2 heparin binding domain-containing peptide sequence
RKHVGLNNPHK

SEQ ID NO: 4681 - protein, 11 aa, Artificial
  IGFBP-2 heparin binding domain-containing peptide sequence
HKHVGLNNPHK

SEQ ID NO: 4682 - protein, 11 aa, Artificial
  IGFBP-2 heparin binding domain-containing peptide sequence
KRHVGLNNPHK

SEQ ID NO: 4683 - protein, 11 aa, Artificial
  IGFBP-2 heparin binding domain-containing peptide sequence
RRHVGLNNPHK

SEQ ID NO: 4684 - protein, 11 aa, Artificial
  IGFBP-2 heparin binding domain-containing peptide sequence
HRHVGLNNPHK

SEQ ID NO: 4685 - protein, 11 aa, Artificial
  IGFBP-2 heparin binding domain-containing peptide sequence
KHKVGLNNPHK

SEQ ID NO: 4686 - protein, 11 aa, Artificial
  IGFBP-2 heparin binding domain-containing peptide sequence
RHKVGLNNPHK

SEQ ID NO: 4687 - protein, 11 aa, Artificial
  IGFBP-2 heparin binding domain-containing peptide sequence
HHKVGLNNPHK

SEQ ID NO: 4688 - protein, 11 aa, Artificial
  IGFBP-2 heparin binding domain-containing peptide sequence
KKKVGLNNPHK

SEQ ID NO: 4689 - protein, 11 aa, Artificial
  IGFBP-2 heparin binding domain-containing peptide sequence
RKKVGLNNPHK

SEQ ID NO: 4690 - protein, 11 aa, Artificial
  IGFBP-2 heparin binding domain-containing peptide sequence
HKKVGLNNPHK

SEQ ID NO: 4691 - protein, 11 aa, Artificial
  IGFBP-2 heparin binding domain-containing peptide sequence
KRKVGLNNPHK

SEQ ID NO: 4692 - protein, 11 aa, Artificial
  IGFBP-2 heparin binding domain-containing peptide sequence
RRKVGLNNPHK

SEQ ID NO: 4693 - protein, 11 aa, Artificial
  IGFBP-2 heparin binding domain-containing peptide sequence
HRKVGLNNPHK

SEQ ID NO: 4694 - protein, 11 aa, Artificial
  IGFBP-2 heparin binding domain-containing peptide sequence
KHRVGLNNPHK

SEQ ID NO: 4695 - protein, 11 aa, Artificial
  IGFBP-2 heparin binding domain-containing peptide sequence
RHRVGLNNPHK

SEQ ID NO: 4696 - protein, 11 aa, Artificial
  IGFBP-2 heparin binding domain-containing peptide sequence
HHRVGLNNPHK

SEQ ID NO: 4697 - protein, 11 aa, Artificial
  IGFBP-2 heparin binding domain-containing peptide sequence
KKRVGLNNPHK

SEQ ID NO: 4698 - protein, 11 aa, Artificial
  IGFBP-2 heparin binding domain-containing peptide sequence
RKRVGLNNPHK

SEQ ID NO: 4699 - protein, 11 aa, Artificial
  IGFBP-2 heparin binding domain-containing peptide sequence
HKRVGLNNPHK

SEQ ID NO: 4700 - protein, 11 aa, Artificial
  IGFBP-2 heparin binding domain-containing peptide sequence
KRRVGLNNPHK

SEQ ID NO: 4701 - protein, 11 aa, Artificial
  IGFBP-2 heparin binding domain-containing peptide sequence
RRRVGLNNPHK

SEQ ID NO: 4702 - protein, 11 aa, Artificial
  IGFBP-2 heparin binding domain-containing peptide sequence
HRRVGLNNPHK

SEQ ID NO: 4703 - protein, 11 aa, Artificial
  IGFBP-2 heparin binding domain-containing peptide sequence
KHHLGINNPHK

SEQ ID NO: 4704 - protein, 11 aa, Artificial
  IGFBP-2 heparin binding domain-containing peptide sequence
RHHLGINNPHK

SEQ ID NO: 4705 - protein, 11 aa, Artificial
  IGFBP-2 heparin binding domain-containing peptide sequence
HHHLGINNPHK

SEQ ID NO: 4706 - protein, 11 aa, Artificial
  IGFBP-2 heparin binding domain-containing peptide sequence
KKHLGINNPHK

SEQ ID NO: 4707 - protein, 11 aa, Artificial
  IGFBP-2 heparin binding domain-containing peptide sequence
RKHLGINNPHK

SEQ ID NO: 4708 - protein, 11 aa, Artificial
  IGFBP-2 heparin binding domain-containing peptide sequence
HKHLGINNPHK

SEQ ID NO: 4709 - protein, 11 aa, Artificial
  IGFBP-2 heparin binding domain-containing peptide sequence
KRHLGINNPHK

SEQ ID NO: 4710 - protein, 11 aa, Artificial
  IGFBP-2 heparin binding domain-containing peptide sequence
RRHLGINNPHK

SEQ ID NO: 4711 - protein, 11 aa, Artificial
  IGFBP-2 heparin binding domain-containing peptide sequence
HRHLGINNPHK

SEQ ID NO: 4712 - protein, 11 aa, Artificial
  IGFBP-2 heparin binding domain-containing peptide sequence
KHKLGINNPHK

SEQ ID NO: 4713 - protein, 11 aa, Artificial
  IGFBP-2 heparin binding domain-containing peptide sequence
RHKLGINNPHK

SEQ ID NO: 4714 - protein, 11 aa, Artificial
  IGFBP-2 heparin binding domain-containing peptide sequence
HHKLGINNPHK

SEQ ID NO: 4715 - protein, 11 aa, Artificial
  IGFBP-2 heparin binding domain-containing peptide sequence
KKKLGINNPHK

SEQ ID NO: 4716 - protein, 11 aa, Artificial
  IGFBP-2 heparin binding domain-containing peptide sequence
RKKLGINNPHK

SEQ ID NO: 4717 - protein, 11 aa, Artificial
  IGFBP-2 heparin binding domain-containing peptide sequence
HKKLGINNPHK

SEQ ID NO: 4718 - protein, 11 aa, Artificial
  IGFBP-2 heparin binding domain-containing peptide sequence
KRKLGINNPHK

SEQ ID NO: 4719 - protein, 11 aa, Artificial
  IGFBP-2 heparin binding domain-containing peptide sequence
RRKLGINNPHK

SEQ ID NO: 4720 - protein, 11 aa, Artificial
  IGFBP-2 heparin binding domain-containing peptide sequence
HRKLGINNPHK

SEQ ID NO: 4721 - protein, 11 aa, Artificial
  IGFBP-2 heparin binding domain-containing peptide sequence
KHRLGINNPHK

SEQ ID NO: 4722 - protein, 11 aa, Artificial
  IGFBP-2 heparin binding domain-containing peptide sequence
RHRLGINNPHK

SEQ ID NO: 4723 - protein, 11 aa, Artificial
  IGFBP-2 heparin binding domain-containing peptide sequence
HHRLGINNPHK

SEQ ID NO: 4724 - protein, 11 aa, Artificial
  IGFBP-2 heparin binding domain-containing peptide sequence
KKRLGINNPHK

SEQ ID NO: 4725 - protein, 11 aa, Artificial
  IGFBP-2 heparin binding domain-containing peptide sequence
RKRLGINNPHK

SEQ ID NO: 4726 - protein, 11 aa, Artificial
  IGFBP-2 heparin binding domain-containing peptide sequence
HKRLGINNPHK

SEQ ID NO: 4727 - protein, 11 aa, Artificial
  IGFBP-2 heparin binding domain-containing peptide sequence
KRRLGINNPHK

SEQ ID NO: 4728 - protein, 11 aa, Artificial
  IGFBP-2 heparin binding domain-containing peptide sequence
RRRLGINNPHK

SEQ ID NO: 4729 - protein, 11 aa, Artificial
  IGFBP-2 heparin binding domain-containing peptide sequence
HRRLGINNPHK

SEQ ID NO: 4730 - protein, 11 aa, Artificial
  IGFBP-2 heparin binding domain-containing peptide sequence
KHHIGIENPHK

SEQ ID NO: 4731 - protein, 11 aa, Artificial
  IGFBP-2 heparin binding domain-containing peptide sequence
RHHIGINNPHK

SEQ ID NO: 4732 - protein, 11 aa, Artificial
  IGFBP-2 heparin binding domain-containing peptide sequence
HHHIGINNPHK

SEQ ID NO: 4733 - protein, 11 aa, Artificial
  IGFBP-2 heparin binding domain-containing peptide sequence
KKHIGINNPHK

SEQ ID NO: 4734 - protein, 11 aa, Artificial
  IGFBP-2 heparin binding domain-containing peptide sequence
RKHIGINNPHK

SEQ ID NO: 4735 - protein, 11 aa, Artificial
  IGFBP-2 heparin binding domain-containing peptide sequence
HKHIGINNPHK

SEQ ID NO: 4736 - protein, 11 aa, Artificial
  IGFBP-2 heparin binding domain-containing peptide sequence
KRHIGINNPHK

SEQ ID NO: 4737 - protein, 11 aa, Artificial
  IGFBP-2 heparin binding domain-containing peptide sequence
RRHIGINNPHK

SEQ ID NO: 4738 - protein, 11 aa, Artificial
  IGFBP-2 heparin binding domain-containing peptide sequence
HRHIGINNPHK

SEQ ID NO: 4739 - protein, 11 aa, Artificial
  IGFBP-2 heparin binding domain-containing peptide sequence
KHKIGINNPHK

SEQ ID NO: 4740 - protein, 11 aa, Artificial
  IGFBP-2 heparin binding domain-containing peptide sequence
RHKIGINNPHK

SEQ ID NO: 4741 - protein, 11 aa, Artificial
  IGFBP-2 heparin binding domain-containing peptide sequence
HHKIGINNPHK

SEQ ID NO: 4742 - protein, 11 aa, Artificial
  IGFBP-2 heparin binding domain-containing peptide sequence
KKKIGINNPHK

SEQ ID NO: 4743 - protein, 11 aa, Artificial
  IGFBP-2 heparin binding domain-containing peptide sequence
RKKIGINNPHK

SEQ ID NO: 4744 - protein, 11 aa, Artificial
  IGFBP-2 heparin binding domain-containing peptide sequence
HKKIGINNPHK

SEQ ID NO: 4745 - protein, 11 aa, Artificial
  IGFBP-2 heparin binding domain-containing peptide sequence
KRKIGINNPHK

SEQ ID NO: 4746 - protein, 11 aa, Artificial
  IGFBP-2 heparin binding domain-containing peptide sequence
RRKIGINNPHK

SEQ ID NO: 4747 - protein, 11 aa, Artificial
  IGFBP-2 heparin binding domain-containing peptide sequence
HRKIGINNPHK

SEQ ID NO: 4748 - protein, 11 aa, Artificial
  IGFBP-2 heparin binding domain-containing peptide sequence
KHRIGINNPHK

SEQ ID NO: 4749 - protein, 11 aa, Artificial
  IGFBP-2 heparin binding domain-containing peptide sequence
RHRIGINNPHK

SEQ ID NO: 4750 - protein, 11 aa, Artificial
  IGFBP-2 heparin binding domain-containing peptide sequence
HHRIGINNPHK

SEQ ID NO: 4751 - protein, 11 aa, Artificial
  IGFBP-2 heparin binding domain-containing peptide sequence
KKRIGINNPHK

SEQ ID NO: 4752 - protein, 11 aa, Artificial
  IGFBP-2 heparin binding domain-containing peptide sequence
RKRIGINNPHK

SEQ ID NO: 4753 - protein, 11 aa, Artificial
  IGFBP-2 heparin binding domain-containing peptide sequence
HKRIGINNPHK

SEQ ID NO: 4754 - protein, 11 aa, Artificial
  IGFBP-2 heparin binding domain-containing peptide sequence
KRRIGINNPHK

SEQ ID NO: 4755 - protein, 11 aa, Artificial
  IGFBP-2 heparin binding domain-containing peptide sequence
RRRIGINNPHK

SEQ ID NO: 4756 - protein, 11 aa, Artificial
  IGFBP-2 heparin binding domain-containing peptide sequence
HRRIGINNPHK

SEQ ID NO: 4757 - protein, 11 aa, Artificial
  IGFBP-2 heparin binding domain-containing peptide sequence
KHHVGINNPHK

SEQ ID NO: 4758 - protein, 11 aa, Artificial
  IGFBP-2 heparin binding domain-containing peptide sequence
RHHVGINNPHK

SEQ ID NO: 4759 - protein, 11 aa, Artificial
  IGFBP-2 heparin binding domain-containing peptide sequence
HHHVGINNPHK

SEQ ID NO: 4760 - protein, 11 aa, Artificial
  IGFBP-2 heparin binding domain-containing peptide sequence
KKHVGINNPHK

SEQ ID NO: 4761 - protein, 11 aa, Artificial
  IGFBP-2 heparin binding domain-containing peptide sequence
RKHVGINNPHK

SEQ ID NO: 4762 - protein, 11 aa, Artificial
  IGFBP-2 heparin binding domain-containing peptide sequence
HKHVGINNPHK

SEQ ID NO: 4763 - protein, 11 aa, Artificial
  IGFBP-2 heparin binding domain-containing peptide sequence
KRHVGINNPHK

SEQ ID NO: 4764 - protein, 11 aa, Artificial
  IGFBP-2 heparin binding domain-containing peptide sequence
RRHVGINNPHK

SEQ ID NO: 4765 - protein, 11 aa, Artificial
  IGFBP-2 heparin binding domain-containing peptide sequence
HRHVGINNPHK

SEQ ID NO: 4766 - protein, 11 aa, Artificial
  IGFBP-2 heparin binding domain-containing peptide sequence
KHKVGINNPHK

SEQ ID NO: 4767 - protein, 11 aa, Artificial
  IGFBP-2 heparin binding domain-containing peptide sequence
RHKVGINNPHK

SEQ ID NO: 4768 - protein, 11 aa, Artificial
  IGFBP-2 heparin binding domain-containing peptide sequence
HHKVGINNPHK

SEQ ID NO: 4769 - protein, 11 aa, Artificial
  IGFBP-2 heparin binding domain-containing peptide sequence
KKKVGINNPHK

SEQ ID NO: 4770 - protein, 11 aa, Artificial
  IGFBP-2 heparin binding domain-containing peptide sequence
RKKVGINNPHK

SEQ ID NO: 4771 - protein, 11 aa, Artificial
  IGFBP-2 heparin binding domain-containing peptide sequence
HKKVGINNPHK

SEQ ID NO: 4772 - protein, 11 aa, Artificial
  IGFBP-2 heparin binding domain-containing peptide sequence
KRKVGINNPHK

SEQ ID NO: 4773 - protein, 11 aa, Artificial
  IGFBP-2 heparin binding domain-containing peptide sequence
RRKVGINNPHK

SEQ ID NO: 4774 - protein, 11 aa, Artificial
  IGFBP-2 heparin binding domain-containing peptide sequence
HRKVGINNPHK

SEQ ID NO: 4775 - protein, 11 aa, Artificial
  IGFBP-2 heparin binding domain-containing peptide sequence
KHRVGINNPHK

SEQ ID NO: 4776 - protein, 11 aa, Artificial
  IGFBP-2 heparin binding domain-containing peptide sequence
RHRVGINNPHK

SEQ ID NO: 4777 - protein, 11 aa, Artificial
  IGFBP-2 heparin binding domain-containing peptide sequence
HHRVGINNPHK

SEQ ID NO: 4778 - protein, 11 aa, Artificial
  IGFBP-2 heparin binding domain-containing peptide sequence
KKRVGINNPHK

SEQ ID NO: 4779 - protein, 11 aa, Artificial
  IGFBP-2 heparin binding domain-containing peptide sequence
RKRVGINNPHK

SEQ ID NO: 4780 - protein, 11 aa, Artificial
  IGFBP-2 heparin binding domain-containing peptide sequence
HKRVGINNPHK

SEQ ID NO: 4781 - protein, 11 aa, Artificial
  IGFBP-2 heparin binding domain-containing peptide sequence
KRRVGINNPHK

SEQ ID NO: 4782 - protein, 11 aa, Artificial
  IGFBP-2 heparin binding domain-containing peptide sequence
RRRVGINNPHK

SEQ ID NO: 4783 - protein, 11 aa, Artificial
  IGFBP-2 heparin binding domain-containing peptide sequence
HRRVGINNPHK

SEQ ID NO: 4784 - protein, 11 aa, Artificial
  IGFBP-2 heparin binding domain-containing peptide sequence
KHHLGVNNPHK

SEQ ID NO: 4785 - protein, 11 aa, Artificial
  IGFBP-2 heparin binding domain-containing peptide sequence
RHHLGVNNPHK

SEQ ID NO: 4786 - protein, 11 aa, Artificial
  IGFBP-2 heparin binding domain-containing peptide sequence
HHHLGVNNPHK

SEQ ID NO: 4787 - protein, 11 aa, Artificial
  IGFBP-2 heparin binding domain-containing peptide sequence
KKHLGVNNPHK

SEQ ID NO: 4788 - protein, 11 aa, Artificial
  IGFBP-2 heparin binding domain-containing peptide sequence
RKHLGVNNPHK

SEQ ID NO: 4789 - protein, 11 aa, Artificial
  IGFBP-2 heparin binding domain-containing peptide sequence
HKHLGVNNPHK

SEQ ID NO: 4790 - protein, 11 aa, Artificial
  IGFBP-2 heparin binding domain-containing peptide sequence
KRHLGVNNPHK

SEQ ID NO: 4791 - protein, 11 aa, Artificial
  IGFBP-2 heparin binding domain-containing peptide sequence
RRHLGVNNPHK

SEQ ID NO: 4792 - protein, 11 aa, Artificial
  IGFBP-2 heparin binding domain-containing peptide sequence
HRHLGVNNPHK

SEQ ID NO: 4793 - protein, 11 aa, Artificial
  IGFBP-2 heparin binding domain-containing peptide sequence
KHKLGVNNPHK

SEQ ID NO: 4794 - protein, 11 aa, Artificial
  IGFBP-2 heparin binding domain-containing peptide sequence
RHKLGVNNPHK

SEQ ID NO: 4795 - protein, 11 aa, Artificial
  IGFBP-2 heparin binding domain-containing peptide sequence
HHKLGVNNPHK

SEQ ID NO: 4796 - protein, 11 aa, Artificial
  IGFBP-2 heparin binding domain-containing peptide sequence
KKKLGVNNPHK

SEQ ID NO: 4797 - protein, 11 aa, Artificial
  IGFBP-2 heparin binding domain-containing peptide sequence
RKKLGVNNPHK

SEQ ID NO: 4798 - protein, 11 aa, Artificial
  IGFBP-2 heparin binding domain-containing peptide sequence
HKKLGVNNPHK

SEQ ID NO: 4799 - protein, 11 aa, Artificial
  IGFBP-2 heparin binding domain-containing peptide sequence
KRKLGVNNPHK

SEQ ID NO: 4800 - protein, 11 aa, Artificial
  IGFBP-2 heparin binding domain-containing peptide sequence
RRKLGVNNPHK

SEQ ID NO: 4801 - protein, 11 aa, Artificial
  IGFBP-2 heparin binding domain-containing peptide sequence
HRKLGVNNPHK

SEQ ID NO: 4802 - protein, 11 aa, Artificial
  IGFBP-2 heparin binding domain-containing peptide sequence
KHRLGVNNPHK

SEQ ID NO: 4803 - protein, 11 aa, Artificial
  IGFBP-2 heparin binding domain-containing peptide sequence
RHRLGVNNPHK

SEQ ID NO: 4804 - protein, 11 aa, Artificial
  IGFBP-2 heparin binding domain-containing peptide sequence
HHRLGVNNPHK

SEQ ID NO: 4805 - protein, 11 aa, Artificial
  IGFBP-2 heparin binding domain-containing peptide sequence
KKRLGVNNPHK

SEQ ID NO: 4806 - protein, 11 aa, Artificial
  IGFBP-2 heparin binding domain-containing peptide sequence
RKRLGVNNPHK

SEQ ID NO: 4807 - protein, 11 aa, Artificial
  IGFBP-2 heparin binding domain-containing peptide sequence
HKRLGVNNPHK

SEQ ID NO: 4808 - protein, 11 aa, Artificial
  IGFBP-2 heparin binding domain-containing peptide sequence
KRRLGVNNPHK

SEQ ID NO: 4809 - protein, 11 aa, Artificial
  IGFBP-2 heparin binding domain-containing peptide sequence
RRRLGVNNPHK

SEQ ID NO: 4810 - protein, 11 aa, Artificial
  IGFBP-2 heparin binding domain-containing peptide sequence
HRRLGVNNPHK

SEQ ID NO: 4811 - protein, 11 aa, Artificial
  IGFBP-2 heparin binding domain-containing peptide sequence
KHHIGVNNPHK

SEQ ID NO: 4812 - protein, 11 aa, Artificial
  IGFBP-2 heparin binding domain-containing peptide sequence
RHHIGVNNPHK

SEQ ID NO: 4813 - protein, 11 aa, Artificial
  IGFBP-2 heparin binding domain-containing peptide sequence
HHHIGVNNPHK

SEQ ID NO: 4814 - protein, 11 aa, Artificial
  IGFBP-2 heparin binding domain-containing peptide sequence
KKHIGVNNPHK

SEQ ID NO: 4815 - protein, 11 aa, Artificial
  IGFBP-2 heparin binding domain-containing peptide sequence
RKHIGVNNPHK

SEQ ID NO: 4816 - protein, 11 aa, Artificial
  IGFBP-2 heparin binding domain-containing peptide sequence
HKHIGVNNPHK

SEQ ID NO: 4817 - protein, 11 aa, Artificial
  IGFBP-2 heparin binding domain-containing peptide sequence
KRHIGVNNPHK

SEQ ID NO: 4818 - protein, 11 aa, Artificial
  IGFBP-2 heparin binding domain-containing peptide sequence
RRHIGVNNPHK

SEQ ID NO: 4819 - protein, 11 aa, Artificial
  IGFBP-2 heparin binding domain-containing peptide sequence
HRHIGVNNPHK

SEQ ID NO: 4820 - protein, 11 aa, Artificial
  IGFBP-2 heparin binding domain-containing peptide sequence
KHKIGVNNPHK

SEQ ID NO: 4821 - protein, 11 aa, Artificial
  IGFBP-2 heparin binding domain-containing peptide sequence
RHKIGVNNPHK

SEQ ID NO: 4822 - protein, 11 aa, Artificial
  IGFBP-2 heparin binding domain-containing peptide sequence
HHKIGVNNPHK

SEQ ID NO: 4823 - protein, 11 aa, Artificial
  IGFBP-2 heparin binding domain-containing peptide sequence
KKKIGVNNPHK

SEQ ID NO: 4824 - protein, 11 aa, Artificial
  IGFBP-2 heparin binding domain-containing peptide sequence
RKKIGVNNPHK

SEQ ID NO: 4825 - protein, 11 aa, Artificial
  IGFBP-2 heparin binding domain-containing peptide sequence
HKKIGVNNPHK

SEQ ID NO: 4826 - protein, 11 aa, Artificial
  IGFBP-2 heparin binding domain-containing peptide sequence
KRKIGVNNPHK

SEQ ID NO: 4827 - protein, 11 aa, Artificial
  IGFBP-2 heparin binding domain-containing peptide sequence
RRKIGVNNPHK

SEQ ID NO: 4828 - protein, 11 aa, Artificial
  IGFBP-2 heparin binding domain-containing peptide sequence
HRKIGVNNPHK

SEQ ID NO: 4829 - protein, 11 aa, Artificial
  IGFBP-2 heparin binding domain-containing peptide sequence
KHRIGVNNPHK

SEQ ID NO: 4830 - protein, 11 aa, Artificial
  IGFBP-2 heparin binding domain-containing peptide sequence
RHRIGVNNPHK

SEQ ID NO: 4831 - protein, 11 aa, Artificial
  IGFBP-2 heparin binding domain-containing peptide sequence
HHRIGVNNPHK

SEQ ID NO: 4832 - protein, 11 aa, Artificial
  IGFBP-2 heparin binding domain-containing peptide sequence
KKRIGVNNPHK

SEQ ID NO: 4833 - protein, 11 aa, Artificial
  IGFBP-2 heparin binding domain-containing peptide sequence
RKRIGVNNPHK

SEQ ID NO: 4834 - protein, 11 aa, Artificial
  IGFBP-2 heparin binding domain-containing peptide sequence
HKRIGVNNPHK

SEQ ID NO: 4835 - protein, 11 aa, Artificial
  IGFBP-2 heparin binding domain-containing peptide sequence
KRRIGVNNPHK

SEQ ID NO: 4836 - protein, 11 aa, Artificial
  IGFBP-2 heparin binding domain-containing peptide sequence
RRRIGVNNPHK

SEQ ID NO: 4837 - protein, 11 aa, Artificial
  IGFBP-2 heparin binding domain-containing peptide sequence
HRRIGVNNPHK

SEQ ID NO: 4838 - protein, 11 aa, Artificial
  IGFBP-2 heparin binding domain-containing peptide sequence
KHHVGVNNPHK

SEQ ID NO: 4839 - protein, 11 aa, Artificial
  IGFBP-2 heparin binding domain-containing peptide sequence
RHHVGVNNPHK

SEQ ID NO: 4840 - protein, 11 aa, Artificial
  IGFBP-2 heparin binding domain-containing peptide sequence
HHHVGVNNPHK

SEQ ID NO: 4841 - protein, 11 aa, Artificial
  IGFBP-2 heparin binding domain-containing peptide sequence
KKHVGVNNPHK

SEQ ID NO: 4842 - protein, 11 aa, Artificial
  IGFBP-2 heparin binding domain-containing peptide sequence
RKHVGVNNPHK

SEQ ID NO: 4843 - protein, 11 aa, Artificial
  IGFBP-2 heparin binding domain-containing peptide sequence
HKHVGVNNPHK

SEQ ID NO: 4844 - protein, 11 aa, Artificial
  IGFBP-2 heparin binding domain-containing peptide sequence
KRHVGVNNPHK

SEQ ID NO: 4845 - protein, 11 aa, Artificial
  IGFBP-2 heparin binding domain-containing peptide sequence
RRHVGVNNPHK

SEQ ID NO: 4846 - protein, 11 aa, Artificial
  IGFBP-2 heparin binding domain-containing peptide sequence
HRHVGVNNPHK

SEQ ID NO: 4847 - protein, 11 aa, Artificial
  IGFBP-2 heparin binding domain-containing peptide sequence
KHKVGVNNPHK

SEQ ID NO: 4848 - protein, 11 aa, Artificial
  IGFBP-2 heparin binding domain-containing peptide sequence
RHKVGVNNPHK

SEQ ID NO: 4849 - protein, 11 aa, Artificial
  IGFBP-2 heparin binding domain-containing peptide sequence
HHKVGVNNPHK

SEQ ID NO: 4850 - protein, 11 aa, Artificial
  IGFBP-2 heparin binding domain-containing peptide sequence
KKKVGVNNPHK

SEQ ID NO: 4851 - protein, 11 aa, Artificial
  IGFBP-2 heparin binding domain-containing peptide sequence
RKKVGVNNPHK

SEQ ID NO: 4852 - protein, 11 aa, Artificial
  IGFBP-2 heparin binding domain-containing peptide sequence
HKKVGVNNPHK

SEQ ID NO: 4853 - protein, 11 aa, Artificial
  IGFBP-2 heparin binding domain-containing peptide sequence
KRKVGVNNPHK

SEQ ID NO: 4854 - protein, 11 aa, Artificial
  IGFBP-2 heparin binding domain-containing peptide sequence
RRKVGVNNPHK

SEQ ID NO: 4855 - protein, 11 aa, Artificial
  IGFBP-2 heparin binding domain-containing peptide sequence
HRKVGVNNPHK

SEQ ID NO: 4856 - protein, 11 aa, Artificial
  IGFBP-2 heparin binding domain-containing peptide sequence
KHRVGVNNPHK

SEQ ID NO: 4857 - protein, 11 aa, Artificial
  IGFBP-2 heparin binding domain-containing peptide sequence
RHRVGVNNPHK

SEQ ID NO: 4858 - protein, 11 aa, Artificial
  IGFBP-2 heparin binding domain-containing peptide sequence
HHRVGVNNPHK

SEQ ID NO: 4859 - protein, 11 aa, Artificial
  IGFBP-2 heparin binding domain-containing peptide sequence
KKRVGVNNPHK

SEQ ID NO: 4860 - protein, 11 aa, Artificial
  IGFBP-2 heparin binding domain-containing peptide sequence
RKRVGVNNPHK

SEQ ID NO: 4861 - protein, 11 aa, Artificial
  IGFBP-2 heparin binding domain-containing peptide sequence
HKRVGVNNPHK

SEQ ID NO: 4862 - protein, 11 aa, Artificial
  IGFBP-2 heparin binding domain-containing peptide sequence
KRRVGVNNPHK

SEQ ID NO: 4863 - protein, 11 aa, Artificial
  IGFBP-2 heparin binding domain-containing peptide sequence
RRRVGVNNPHK

SEQ ID NO: 4864 - protein, 11 aa, Artificial
  IGFBP-2 heparin binding domain-containing peptide sequence
HRRVGVNNPHK

SEQ ID NO: 4865 - protein, 11 aa, Artificial
  IGFBP-2 heparin binding domain-containing peptide sequence
KHHLGLEEPRR

SEQ ID NO: 4866 - protein, 11 aa, Artificial
  IGFBP-2 heparin binding domain-containing peptide sequence
RHHLGLEEPRR

SEQ ID NO: 4867 - protein, 11 aa, Artificial
  IGFBP-2 heparin binding domain-containing peptide sequence
HHHLGLEEPRR

SEQ ID NO: 4868 - protein, 11 aa, Artificial
  IGFBP-2 heparin binding domain-containing peptide sequence
KKHLGLEEPRR

SEQ ID NO: 4869 - protein, 11 aa, Artificial
  IGFBP-2 heparin binding domain-containing peptide sequence
RKHLGLEEPRR

SEQ ID NO: 4870 - protein, 11 aa, Artificial
  IGFBP-2 heparin binding domain-containing peptide sequence
HKHLGLEEPRR

SEQ ID NO: 4871 - protein, 11 aa, Artificial
  IGFBP-2 heparin binding domain-containing peptide sequence
KRHLGLEEPRR

SEQ ID NO: 4872 - protein, 11 aa, Artificial
  IGFBP-2 heparin binding domain-containing peptide sequence
RRHLGLEEPRR

SEQ ID NO: 4873 - protein, 11 aa, Artificial
  IGFBP-2 heparin binding domain-containing peptide sequence
HRHLGLEEPRR

SEQ ID NO: 4874 - protein, 11 aa, Artificial
  IGFBP-2 heparin binding domain-containing peptide sequence
KHKLGLEEPRR

SEQ ID NO: 4875 - protein, 11 aa, Artificial
  IGFBP-2 heparin binding domain-containing peptide sequence
RHKLGLEEPRR

SEQ ID NO: 4876 - protein, 11 aa, Artificial
  IGFBP-2 heparin binding domain-containing peptide sequence
HHKLGLEEPRR

SEQ ID NO: 4877 - protein, 11 aa, Artificial
  IGFBP-2 heparin binding domain-containing peptide sequence
KKKLGLEEPRR

SEQ ID NO: 4878 - protein, 11 aa, Artificial
  IGFBP-2 heparin binding domain-containing peptide sequence
RKKLGLEEPRR

SEQ ID NO: 4879 - protein, 11 aa, Artificial
  IGFBP-2 heparin binding domain-containing peptide sequence
HKKLGLEEPRR

SEQ ID NO: 4880 - protein, 11 aa, Artificial
  IGFBP-2 heparin binding domain-containing peptide sequence
KRKLGLEEPRR

SEQ ID NO: 4881 - protein, 11 aa, Artificial
  IGFBP-2 heparin binding domain-containing peptide sequence
RRKLGLEEPRR

SEQ ID NO: 4882 - protein, 11 aa, Artificial
  IGFBP-2 heparin binding domain-containing peptide sequence
HRKLGLEEPRR

SEQ ID NO: 4883 - protein, 11 aa, Artificial
  IGFBP-2 heparin binding domain-containing peptide sequence
KHRLGLEEPRR

SEQ ID NO: 4884 - protein, 11 aa, Artificial
  IGFBP-2 heparin binding domain-containing peptide sequence
RHRLGLEEPRR

SEQ ID NO: 4885 - protein, 11 aa, Artificial
  IGFBP-2 heparin binding domain-containing peptide sequence
HHRLGLEEPRR

SEQ ID NO: 4886 - protein, 11 aa, Artificial
  IGFBP-2 heparin binding domain-containing peptide sequence
KKRLGLEEPRR

SEQ ID NO: 4887 - protein, 11 aa, Artificial
  IGFBP-2 heparin binding domain-containing peptide sequence
RKRLGLEEPRR

SEQ ID NO: 4888 - protein, 11 aa, Artificial
  IGFBP-2 heparin binding domain-containing peptide sequence
HKRLGLEEPRR

SEQ ID NO: 4889 - protein, 11 aa, Artificial
  IGFBP-2 heparin binding domain-containing peptide sequence
KRRLGLEEPRR

SEQ ID NO: 4890 - protein, 11 aa, Artificial
  IGFBP-2 heparin binding domain-containing peptide sequence
RRRLGLEEPRR

SEQ ID NO: 4891 - protein, 11 aa, Artificial
  IGFBP-2 heparin binding domain-containing peptide sequence
HRRLGLEEPRR

SEQ ID NO: 4892 - protein, 11 aa, Artificial
  IGFBP-2 heparin binding domain-containing peptide sequence
KHHIGLEEPRR

SEQ ID NO: 4893 - protein, 11 aa, Artificial
  IGFBP-2 heparin binding domain-containing peptide sequence
RHHIGLEEPRR

SEQ ID NO: 4894 - protein, 11 aa, Artificial
  IGFBP-2 heparin binding domain-containing peptide sequence
HHHIGLEEPRR

SEQ ID NO: 4895 - protein, 11 aa, Artificial
  IGFBP-2 heparin binding domain-containing peptide sequence
KKHIGLEEPRR

SEQ ID NO: 4896 - protein, 11 aa, Artificial
  IGFBP-2 heparin binding domain-containing peptide sequence
RKHIGLEEPRR

SEQ ID NO: 4897 - protein, 11 aa, Artificial
  IGFBP-2 heparin binding domain-containing peptide sequence
HKHIGLEEPRR

SEQ ID NO: 4898 - protein, 11 aa, Artificial
  IGFBP-2 heparin binding domain-containing peptide sequence
KRHIGLEEPRR

SEQ ID NO: 4899 - protein, 11 aa, Artificial
  IGFBP-2 heparin binding domain-containing peptide sequence
RRHIGLEEPRR

SEQ ID NO: 4900 - protein, 11 aa, Artificial
  IGFBP-2 heparin binding domain-containing peptide sequence
HRHIGLEEPRR

SEQ ID NO: 4901 - protein, 11 aa, Artificial
  IGFBP-2 heparin binding domain-containing peptide sequence
KHKIGLEEPRR

SEQ ID NO: 4902 - protein, 11 aa, Artificial
  IGFBP-2 heparin binding domain-containing peptide sequence
RHKIGLEEPRR

SEQ ID NO: 4903 - protein, 11 aa, Artificial
  IGFBP-2 heparin binding domain-containing peptide sequence
HHKIGLEEPRR

SEQ ID NO: 4904 - protein, 11 aa, Artificial
  IGFBP-2 heparin binding domain-containing peptide sequence
KKKIGLEEPRR

SEQ ID NO: 4905 - protein, 11 aa, Artificial
  IGFBP-2 heparin binding domain-containing peptide sequence
RKKIGLEEPRR

SEQ ID NO: 4906 - protein, 11 aa, Artificial
  IGFBP-2 heparin binding domain-containing peptide sequence
HKKIGLEEPRR

SEQ ID NO: 4907 - protein, 11 aa, Artificial
  IGFBP-2 heparin binding domain-containing peptide sequence
KRKIGLEEPRR

SEQ ID NO: 4908 - protein, 11 aa, Artificial
  IGFBP-2 heparin binding domain-containing peptide sequence
RRKIGLEEPRR

SEQ ID NO: 4909 - protein, 11 aa, Artificial
  IGFBP-2 heparin binding domain-containing peptide sequence
HRKIGLEEPRR

SEQ ID NO: 4910 - protein, 11 aa, Artificial
  IGFBP-2 heparin binding domain-containing peptide sequence
KHRIGLEEPRR

SEQ ID NO: 4911 - protein, 11 aa, Artificial
  IGFBP-2 heparin binding domain-containing peptide sequence
RHRIGLEEPRR

SEQ ID NO: 4912 - protein, 11 aa, Artificial
  IGFBP-2 heparin binding domain-containing peptide sequence
HHRIGLEEPRR

SEQ ID NO: 4913 - protein, 11 aa, Artificial
  IGFBP-2 heparin binding domain-containing peptide sequence
KKRIGLEEPRR

SEQ ID NO: 4914 - protein, 11 aa, Artificial
  IGFBP-2 heparin binding domain-containing peptide sequence
RKRIGLEEPRR

SEQ ID NO: 4915 - protein, 11 aa, Artificial
  IGFBP-2 heparin binding domain-containing peptide sequence
HKRIGLEEPRR

SEQ ID NO: 4916 - protein, 11 aa, Artificial
  IGFBP-2 heparin binding domain-containing peptide sequence
KRRIGLEEPRR

SEQ ID NO: 4917 - protein, 11 aa, Artificial
  IGFBP-2 heparin binding domain-containing peptide sequence
RRRIGLEEPRR

SEQ ID NO: 4918 - protein, 11 aa, Artificial
  IGFBP-2 heparin binding domain-containing peptide sequence
HRRIGLEEPRR

SEQ ID NO: 4919 - protein, 11 aa, Artificial
  IGFBP-2 heparin binding domain-containing peptide sequence
KHHVGLEEPRR

SEQ ID NO: 4920 - protein, 11 aa, Artificial
  IGFBP-2 heparin binding domain-containing peptide sequence
RHHVGLEEPRR

SEQ ID NO: 4921 - protein, 11 aa, Artificial
  IGFBP-2 heparin binding domain-containing peptide sequence
HHHVGLEEPRR

SEQ ID NO: 4922 - protein, 11 aa, Artificial
  IGFBP-2 heparin binding domain-containing peptide sequence
KKHVGLEEPRR

SEQ ID NO: 4923 - protein, 11 aa, Artificial
  IGFBP-2 heparin binding domain-containing peptide sequence
RKHVGLEEPRR

SEQ ID NO: 4924 - protein, 11 aa, Artificial
  IGFBP-2 heparin binding domain-containing peptide sequence
HKHVGLEEPRR

SEQ ID NO: 4925 - protein, 11 aa, Artificial
  IGFBP-2 heparin binding domain-containing peptide sequence
KRHVGLEEPRR

SEQ ID NO: 4926 - protein, 11 aa, Artificial
  IGFBP-2 heparin binding domain-containing peptide sequence
RRHVGLEEPRR

SEQ ID NO: 4927 - protein, 11 aa, Artificial
  IGFBP-2 heparin binding domain-containing peptide sequence
HRHVGLEEPRR

SEQ ID NO: 4928 - protein, 11 aa, Artificial
  IGFBP-2 heparin binding domain-containing peptide sequence
KHKVGLEEPRR

SEQ ID NO: 4929 - protein, 11 aa, Artificial
  IGFBP-2 heparin binding domain-containing peptide sequence
RHKVGLEEPRR

SEQ ID NO: 4930 - protein, 11 aa, Artificial
  IGFBP-2 heparin binding domain-containing peptide sequence
HHKVGLEEPRR

SEQ ID NO: 4931 - protein, 11 aa, Artificial
  IGFBP-2 heparin binding domain-containing peptide sequence
KKKVGLEEPRR

SEQ ID NO: 4932 - protein, 11 aa, Artificial
  IGFBP-2 heparin binding domain-containing peptide sequence
RKKVGLEEPRR

SEQ ID NO: 4933 - protein, 11 aa, Artificial
  IGFBP-2 heparin binding domain-containing peptide sequence
HKKVGLEEPRR

SEQ ID NO: 4934 - protein, 11 aa, Artificial
  IGFBP-2 heparin binding domain-containing peptide sequence
KRKVGLEEPRR

SEQ ID NO: 4935 - protein, 11 aa, Artificial
  IGFBP-2 heparin binding domain-containing peptide sequence
RRKVGLEEPRR

SEQ ID NO: 4936 - protein, 11 aa, Artificial
  IGFBP-2 heparin binding domain-containing peptide sequence
HRKVGLEEPRR

SEQ ID NO: 4937 - protein, 11 aa, Artificial
  IGFBP-2 heparin binding domain-containing peptide sequence
KHRVGLEEPRR

SEQ ID NO: 4938 - protein, 11 aa, Artificial
  IGFBP-2 heparin binding domain-containing peptide sequence
RHRVGLEEPRR

SEQ ID NO: 4939 - protein, 11 aa, Artificial
  IGFBP-2 heparin binding domain-containing peptide sequence
HHRVGLEEPRR

SEQ ID NO: 4940 - protein, 11 aa, Artificial
  IGFBP-2 heparin binding domain-containing peptide sequence
KKRVGLEEPRR

SEQ ID NO: 4941 - protein, 11 aa, Artificial
  IGFBP-2 heparin binding domain-containing peptide sequence
RKRVGLEEPRR

SEQ ID NO: 4942 - protein, 11 aa, Artificial
  IGFBP-2 heparin binding domain-containing peptide sequence
HKRVGLEEPRR

SEQ ID NO: 4943 - protein, 11 aa, Artificial
  IGFBP-2 heparin binding domain-containing peptide sequence
KRRVGLEEPRR

SEQ ID NO: 4944 - protein, 11 aa, Artificial
  IGFBP-2 heparin binding domain-containing peptide sequence
RRRVGLEEPRR

SEQ ID NO: 4945 - protein, 11 aa, Artificial
  IGFBP-2 heparin binding domain-containing peptide sequence
HRRVGLEEPRR

SEQ ID NO: 4946 - protein, 11 aa, Artificial
  IGFBP-2 heparin binding domain-containing peptide sequence
KHHLGIEEPRR

SEQ ID NO: 4947 - protein, 11 aa, Artificial
  IGFBP-2 heparin binding domain-containing peptide sequence
RHHLGIEEPRR

SEQ ID NO: 4948 - protein, 11 aa, Artificial
  IGFBP-2 heparin binding domain-containing peptide sequence
HHHLGIEEPRR

SEQ ID NO: 4949 - protein, 11 aa, Artificial
  IGFBP-2 heparin binding domain-containing peptide sequence
KKHLGIEEPRR

SEQ ID NO: 4950 - protein, 11 aa, Artificial
  IGFBP-2 heparin binding domain-containing peptide sequence
RKHLGIEEPRR

SEQ ID NO: 4951 - protein, 11 aa, Artificial
  IGFBP-2 heparin binding domain-containing peptide sequence
HKHLGIEEPRR

SEQ ID NO: 4952 - protein, 11 aa, Artificial
  IGFBP-2 heparin binding domain-containing peptide sequence
KRHLGIEEPRR

SEQ ID NO: 4953 - protein, 11 aa, Artificial
  IGFBP-2 heparin binding domain-containing peptide sequence
RRHLGIEEPRR

SEQ ID NO: 4954 - protein, 11 aa, Artificial
  IGFBP-2 heparin binding domain-containing peptide sequence
HRHLGIEEPRR

SEQ ID NO: 4955 - protein, 11 aa, Artificial
  IGFBP-2 heparin binding domain-containing peptide sequence
KHKLGIEEPRR

SEQ ID NO: 4956 - protein, 11 aa, Artificial
  IGFBP-2 heparin binding domain-containing peptide sequence
RHKLGIEEPRR

SEQ ID NO: 4957 - protein, 11 aa, Artificial
  IGFBP-2 heparin binding domain-containing peptide sequence
HHKLGIEEPRR

SEQ ID NO: 4958 - protein, 11 aa, Artificial
  IGFBP-2 heparin binding domain-containing peptide sequence
KKKLGIEEPRR

SEQ ID NO: 4959 - protein, 11 aa, Artificial
  IGFBP-2 heparin binding domain-containing peptide sequence
RKKLGIEEPRR

SEQ ID NO: 4960 - protein, 11 aa, Artificial
  IGFBP-2 heparin binding domain-containing peptide sequence
HKKLGIEEPRR

SEQ ID NO: 4961 - protein, 11 aa, Artificial
  IGFBP-2 heparin binding domain-containing peptide sequence
KRKLGIEEPRR

SEQ ID NO: 4962 - protein, 11 aa, Artificial
  IGFBP-2 heparin binding domain-containing peptide sequence
RRKLGIEEPRR

SEQ ID NO: 4963 - protein, 11 aa, Artificial
  IGFBP-2 heparin binding domain-containing peptide sequence
HRKLGIEEPRR

SEQ ID NO: 4964 - protein, 11 aa, Artificial
  IGFBP-2 heparin binding domain-containing peptide sequence
KHRLGIEEPRR

SEQ ID NO: 4965 - protein, 11 aa, Artificial
  IGFBP-2 heparin binding domain-containing peptide sequence
RHRLGIEEPRR

SEQ ID NO: 4966 - protein, 11 aa, Artificial
  IGFBP-2 heparin binding domain-containing peptide sequence
HHRLGIEEPRR

SEQ ID NO: 4967 - protein, 11 aa, Artificial
  IGFBP-2 heparin binding domain-containing peptide sequence
KKRLGIEEPRR

SEQ ID NO: 4968 - protein, 11 aa, Artificial
  IGFBP-2 heparin binding domain-containing peptide sequence
RKRLGIEEPRR

SEQ ID NO: 4969 - protein, 11 aa, Artificial
  IGFBP-2 heparin binding domain-containing peptide sequence
HKRLGIEEPRR

SEQ ID NO: 4970 - protein, 11 aa, Artificial
  IGFBP-2 heparin binding domain-containing peptide sequence
KRRLGIEEPRR

SEQ ID NO: 4971 - protein, 11 aa, Artificial
  IGFBP-2 heparin binding domain-containing peptide sequence
RRRLGIEEPRR

SEQ ID NO: 4972 - protein, 11 aa, Artificial
  IGFBP-2 heparin binding domain-containing peptide sequence
HRRLGIEEPRR

SEQ ID NO: 4973 - protein, 11 aa, Artificial
  IGFBP-2 heparin binding domain-containing peptide sequence
KHHIGIEEPRR

SEQ ID NO: 4974 - protein, 11 aa, Artificial
  IGFBP-2 heparin binding domain-containing peptide sequence
RHHIGIEEPRR

SEQ ID NO: 4975 - protein, 11 aa, Artificial
  IGFBP-2 heparin binding domain-containing peptide sequence
HHHIGIEEPRR

SEQ ID NO: 4976 - protein, 11 aa, Artificial
  IGFBP-2 heparin binding domain-containing peptide sequence
KKHIGIEEPRR

SEQ ID NO: 4977 - protein, 11 aa, Artificial
  IGFBP-2 heparin binding domain-containing peptide sequence
RKHIGIEEPRR

SEQ ID NO: 4978 - protein, 11 aa, Artificial
  IGFBP-2 heparin binding domain-containing peptide sequence
HKHIGIEEPRR

SEQ ID NO: 4979 - protein, 11 aa, Artificial
  IGFBP-2 heparin binding domain-containing peptide sequence
KRHIGIEEPRR

SEQ ID NO: 4980 - protein, 11 aa, Artificial
  IGFBP-2 heparin binding domain-containing peptide sequence
RRHIGIEEPRR

SEQ ID NO: 4981 - protein, 11 aa, Artificial
  IGFBP-2 heparin binding domain-containing peptide sequence
HRHIGIEEPRR

SEQ ID NO: 4982 - protein, 11 aa, Artificial
  IGFBP-2 heparin binding domain-containing peptide sequence
KHKIGIEEPRR

SEQ ID NO: 4983 - protein, 11 aa, Artificial
  IGFBP-2 heparin binding domain-containing peptide sequence
RHKIGIEEPRR

SEQ ID NO: 4984 - protein, 11 aa, Artificial
  IGFBP-2 heparin binding domain-containing peptide sequence
HHKIGIEEPRR

SEQ ID NO: 4985 - protein, 11 aa, Artificial
  IGFBP-2 heparin binding domain-containing peptide sequence
KKKIGIEEPRR

SEQ ID NO: 4986 - protein, 11 aa, Artificial
  IGFBP-2 heparin binding domain-containing peptide sequence
RKKIGIEEPRR

SEQ ID NO: 4987 - protein, 11 aa, Artificial
  IGFBP-2 heparin binding domain-containing peptide sequence
HKKIGIEEPRR

SEQ ID NO: 4988 - protein, 11 aa, Artificial
  IGFBP-2 heparin binding domain-containing peptide sequence
KRKIGIEEPRR

SEQ ID NO: 4989 - protein, 11 aa, Artificial
  IGFBP-2 heparin binding domain-containing peptide sequence
RRKIGIEEPRR

SEQ ID NO: 4990 - protein, 11 aa, Artificial
  IGFBP-2 heparin binding domain-containing peptide sequence
HRKIGIEEPRR

SEQ ID NO: 4991 - protein, 11 aa, Artificial
  IGFBP-2 heparin binding domain-containing peptide sequence
KHRIGIEEPRR

SEQ ID NO: 4992 - protein, 11 aa, Artificial
  IGFBP-2 heparin binding domain-containing peptide sequence
RHRIGIEEPRR

SEQ ID NO: 4993 - protein, 11 aa, Artificial
  IGFBP-2 heparin binding domain-containing peptide sequence
HHRIGIEEPRR

SEQ ID NO: 4994 - protein, 11 aa, Artificial
  IGFBP-2 heparin binding domain-containing peptide sequence
KKRIGIEEPRR

SEQ ID NO: 4995 - protein, 11 aa, Artificial
  IGFBP-2 heparin binding domain-containing peptide sequence
RKRIGIEEPRR

SEQ ID NO: 4996 - protein, 11 aa, Artificial
  IGFBP-2 heparin binding domain-containing peptide sequence
HKRIGIEEPRR

SEQ ID NO: 4997 - protein, 11 aa, Artificial
  IGFBP-2 heparin binding domain-containing peptide sequence
KRRIGIEEPRR

SEQ ID NO: 4998 - protein, 11 aa, Artificial
  IGFBP-2 heparin binding domain-containing peptide sequence
RRRIGIEEPRR

SEQ ID NO: 4999 - protein, 11 aa, Artificial
  IGFBP-2 heparin binding domain-containing peptide sequence
HRRIGIEEPRR

SEQ ID NO: 5000 - protein, 11 aa, Artificial
  IGFBP-2 heparin binding domain-containing peptide sequence
KHHVGIEEPRR

SEQ ID NO: 5001 - protein, 11 aa, Artificial
  IGFBP-2 heparin binding domain-containing peptide sequence
RHHVGIEEPRR

SEQ ID NO: 5002 - protein, 11 aa, Artificial
  IGFBP-2 heparin binding domain-containing peptide sequence
HHHVGIEEPRR

SEQ ID NO: 5003 - protein, 11 aa, Artificial
  IGFBP-2 heparin binding domain-containing peptide sequence
KKHVGIEEPRR

SEQ ID NO: 5004 - protein, 11 aa, Artificial
  IGFBP-2 heparin binding domain-containing peptide sequence
RKHVGIEEPRR

SEQ ID NO: 5005 - protein, 11 aa, Artificial
  IGFBP-2 heparin binding domain-containing peptide sequence
HKHVGIEEPRR

SEQ ID NO: 5006 - protein, 11 aa, Artificial
  IGFBP-2 heparin binding domain-containing peptide sequence
KRHVGIEEPRR

SEQ ID NO: 5007 - protein, 11 aa, Artificial
  IGFBP-2 heparin binding domain-containing peptide sequence
RRHVGIEEPRR

SEQ ID NO: 5008 - protein, 11 aa, Artificial
  IGFBP-2 heparin binding domain-containing peptide sequence
HRHVGIEEPRR

SEQ ID NO: 5009 - protein, 11 aa, Artificial
  IGFBP-2 heparin binding domain-containing peptide sequence
KHKVGIEEPRR

SEQ ID NO: 5010 - protein, 11 aa, Artificial
  IGFBP-2 heparin binding domain-containing peptide sequence
RHKVGIEEPRR

SEQ ID NO: 5011 - protein, 11 aa, Artificial
  IGFBP-2 heparin binding domain-containing peptide sequence
HHKVGIEEPRR

SEQ ID NO: 5012 - protein, 11 aa, Artificial
  IGFBP-2 heparin binding domain-containing peptide sequence
KKKVGIEEPRR

SEQ ID NO: 5013 - protein, 11 aa, Artificial
  IGFBP-2 heparin binding domain-containing peptide sequence
RKKVGIEEPRR

SEQ ID NO: 5014 - protein, 11 aa, Artificial
  IGFBP-2 heparin binding domain-containing peptide sequence
HKKVGIEEPRR

SEQ ID NO: 5015 - protein, 11 aa, Artificial
  IGFBP-2 heparin binding domain-containing peptide sequence
KRKVGIEEPRR

SEQ ID NO: 5016 - protein, 11 aa, Artificial
  IGFBP-2 heparin binding domain-containing peptide sequence
RRKVGIEEPRR

SEQ ID NO: 5017 - protein, 11 aa, Artificial
  IGFBP-2 heparin binding domain-containing peptide sequence
HRKVGIEEPRR

SEQ ID NO: 5018 - protein, 11 aa, Artificial
  IGFBP-2 heparin binding domain-containing peptide sequence
KHRVGIEEPRR

SEQ ID NO: 5019 - protein, 11 aa, Artificial
  IGFBP-2 heparin binding domain-containing peptide sequence
RHRVGIEEPRR

SEQ ID NO: 5020 - protein, 11 aa, Artificial
  IGFBP-2 heparin binding domain-containing peptide sequence
HHRVGIEEPRR

SEQ ID NO: 5021 - protein, 11 aa, Artificial
  IGFBP-2 heparin binding domain-containing peptide sequence
KKRVGIEEPRR

SEQ ID NO: 5022 - protein, 11 aa, Artificial
  IGFBP-2 heparin binding domain-containing peptide sequence
RKRVGIEEPRR

SEQ ID NO: 5023 - protein, 11 aa, Artificial
  IGFBP-2 heparin binding domain-containing peptide sequence
HKRVGIEEPRR

SEQ ID NO: 5024 - protein, 11 aa, Artificial
  IGFBP-2 heparin binding domain-containing peptide sequence
KRRVGIEEPRR

SEQ ID NO: 5025 - protein, 11 aa, Artificial
  IGFBP-2 heparin binding domain-containing peptide sequence
RRRVGIEEPRR

SEQ ID NO: 5026 - protein, 11 aa, Artificial
  IGFBP-2 heparin binding domain-containing peptide sequence
HRRVGIEEPRR

SEQ ID NO: 5027 - protein, 11 aa, Artificial
  IGFBP-2 heparin binding domain-containing peptide sequence
KHHLGVEEPRR

SEQ ID NO: 5028 - protein, 11 aa, Artificial
  IGFBP-2 heparin binding domain-containing peptide sequence
RHHLGVEEPRR

SEQ ID NO: 5029 - protein, 11 aa, Artificial
  IGFBP-2 heparin binding domain-containing peptide sequence
HHHLGVEEPRR

SEQ ID NO: 5030 - protein, 11 aa, Artificial
  IGFBP-2 heparin binding domain-containing peptide sequence
KKHLGVEEPRR

SEQ ID NO: 5031 - protein, 11 aa, Artificial
  IGFBP-2 heparin binding domain-containing peptide sequence
RKHLGVEEPRR

SEQ ID NO: 5032 - protein, 11 aa, Artificial
  IGFBP-2 heparin binding domain-containing peptide sequence
HKHLGVEEPRR

SEQ ID NO: 5033 - protein, 11 aa, Artificial
  IGFBP-2 heparin binding domain-containing peptide sequence
KRHLGVEEPRR

SEQ ID NO: 5034 - protein, 11 aa, Artificial
  IGFBP-2 heparin binding domain-containing peptide sequence
RRHLGVEEPRR

SEQ ID NO: 5035 - protein, 11 aa, Artificial
  IGFBP-2 heparin binding domain-containing peptide sequence
HRHLGVEEPRR

SEQ ID NO: 5036 - protein, 11 aa, Artificial
  IGFBP-2 heparin binding domain-containing peptide sequence
KHKLGVEEPRR

SEQ ID NO: 5037 - protein, 11 aa, Artificial
  IGFBP-2 heparin binding domain-containing peptide sequence
RHKLGVEEPRR

SEQ ID NO: 5038 - protein, 11 aa, Artificial
  IGFBP-2 heparin binding domain-containing peptide sequence
HHKLGVEEPRR

SEQ ID NO: 5039 - protein, 11 aa, Artificial
  IGFBP-2 heparin binding domain-containing peptide sequence
KKKLGVEEPRR

SEQ ID NO: 5040 - protein, 11 aa, Artificial
  IGFBP-2 heparin binding domain-containing peptide sequence
RKKLGVEEPRR

SEQ ID NO: 5041 - protein, 11 aa, Artificial
  IGFBP-2 heparin binding domain-containing peptide sequence
HKKLGVEEPRR

SEQ ID NO: 5042 - protein, 11 aa, Artificial
  IGFBP-2 heparin binding domain-containing peptide sequence
KRKLGVEEPRR

SEQ ID NO: 5043 - protein, 11 aa, Artificial
  IGFBP-2 heparin binding domain-containing peptide sequence
RRKLGVEEPRR

SEQ ID NO: 5044 - protein, 11 aa, Artificial
  IGFBP-2 heparin binding domain-containing peptide sequence
HRKLGVEEPRR

SEQ ID NO: 5045 - protein, 11 aa, Artificial
  IGFBP-2 heparin binding domain-containing peptide sequence
KHRLGVEEPRR

SEQ ID NO: 5046 - protein, 11 aa, Artificial
  IGFBP-2 heparin binding domain-containing peptide sequence
RHRLGVEEPRR

SEQ ID NO: 5047 - protein, 11 aa, Artificial
  IGFBP-2 heparin binding domain-containing peptide sequence
HHRLGVEEPRR

SEQ ID NO: 5048 - protein, 11 aa, Artificial
  IGFBP-2 heparin binding domain-containing peptide sequence
KKRLGVEEPRR

SEQ ID NO: 5049 - protein, 11 aa, Artificial
  IGFBP-2 heparin binding domain-containing peptide sequence
RKRLGVEEPRR

SEQ ID NO: 5050 - protein, 11 aa, Artificial
  IGFBP-2 heparin binding domain-containing peptide sequence
HKRLGVEEPRR

SEQ ID NO: 5051 - protein, 11 aa, Artificial
  IGFBP-2 heparin binding domain-containing peptide sequence
KRRLGVEEPRR

SEQ ID NO: 5052 - protein, 11 aa, Artificial
  IGFBP-2 heparin binding domain-containing peptide sequence
RRRLGVEEPRR

SEQ ID NO: 5053 - protein, 11 aa, Artificial
  IGFBP-2 heparin binding domain-containing peptide sequence
HRRLGVEEPRR

SEQ ID NO: 5054 - protein, 11 aa, Artificial
  IGFBP-2 heparin binding domain-containing peptide sequence
KHHIGVEEPRR

SEQ ID NO: 5055 - protein, 11 aa, Artificial
  IGFBP-2 heparin binding domain-containing peptide sequence
RHHIGVEEPRR

SEQ ID NO: 5056 - protein, 11 aa, Artificial
  IGFBP-2 heparin binding domain-containing peptide sequence
HHHIGVEEPRR

SEQ ID NO: 5057 - protein, 11 aa, Artificial
  IGFBP-2 heparin binding domain-containing peptide sequence
KKHIGVEEPRR

SEQ ID NO: 5058 - protein, 11 aa, Artificial
  IGFBP-2 heparin binding domain-containing peptide sequence
RKHIGVEEPRR

SEQ ID NO: 5059 - protein, 11 aa, Artificial
  IGFBP-2 heparin binding domain-containing peptide sequence
HKHIGVEEPRR

SEQ ID NO: 5060 - protein, 11 aa, Artificial
  IGFBP-2 heparin binding domain-containing peptide sequence
KRHIGVEEPRR

SEQ ID NO: 5061 - protein, 11 aa, Artificial
  IGFBP-2 heparin binding domain-containing peptide sequence
RRHIGVEEPRR

SEQ ID NO: 5062 - protein, 11 aa, Artificial
  IGFBP-2 heparin binding domain-containing peptide sequence
HRHIGVEEPRR

SEQ ID NO: 5063 - protein, 11 aa, Artificial
  IGFBP-2 heparin binding domain-containing peptide sequence
KHKIGVEEPRR

SEQ ID NO: 5064 - protein, 11 aa, Artificial
  IGFBP-2 heparin binding domain-containing peptide sequence
RHKIGVEEPRR

SEQ ID NO: 5065 - protein, 11 aa, Artificial
  IGFBP-2 heparin binding domain-containing peptide sequence
HHKIGVEEPRR

SEQ ID NO: 5066 - protein, 11 aa, Artificial
  IGFBP-2 heparin binding domain-containing peptide sequence
KKKIGVEEPRR

SEQ ID NO: 5067 - protein, 11 aa, Artificial
  IGFBP-2 heparin binding domain-containing peptide sequence
RKKIGVEEPRR

SEQ ID NO: 5068 - protein, 11 aa, Artificial
  IGFBP-2 heparin binding domain-containing peptide sequence
HKKIGVEEPRR

SEQ ID NO: 5069 - protein, 11 aa, Artificial
  IGFBP-2 heparin binding domain-containing peptide sequence
KRKIGVEEPRR

SEQ ID NO: 5070 - protein, 11 aa, Artificial
  IGFBP-2 heparin binding domain-containing peptide sequence
RRKIGVEEPRR

SEQ ID NO: 5071 - protein, 11 aa, Artificial
  IGFBP-2 heparin binding domain-containing peptide sequence
HRKIGVEEPRR

SEQ ID NO: 5072 - protein, 11 aa, Artificial
  IGFBP-2 heparin binding domain-containing peptide sequence
KHRIGVEEPRR

SEQ ID NO: 5073 - protein, 11 aa, Artificial
  IGFBP-2 heparin binding domain-containing peptide sequence
RHRIGVEEPRR

SEQ ID NO: 5074 - protein, 11 aa, Artificial
  IGFBP-2 heparin binding domain-containing peptide sequence
HHRIGVEEPRR

SEQ ID NO: 5075 - protein, 11 aa, Artificial
  IGFBP-2 heparin binding domain-containing peptide sequence
KKRIGVEEPRR

SEQ ID NO: 5076 - protein, 11 aa, Artificial
  IGFBP-2 heparin binding domain-containing peptide sequence
RKRIGVEEPRR

SEQ ID NO: 5077 - protein, 11 aa, Artificial
  IGFBP-2 heparin binding domain-containing peptide sequence
HKRIGVEEPRR

SEQ ID NO: 5078 - protein, 11 aa, Artificial
  IGFBP-2 heparin binding domain-containing peptide sequence
KRRIGVEEPRR

SEQ ID NO: 5079 - protein, 11 aa, Artificial
  IGFBP-2 heparin binding domain-containing peptide sequence
RRRIGVEEPRR

SEQ ID NO: 5080 - protein, 11 aa, Artificial
  IGFBP-2 heparin binding domain-containing peptide sequence
HRRIGVEEPRR

SEQ ID NO: 5081 - protein, 11 aa, Artificial
  IGFBP-2 heparin binding domain-containing peptide sequence
KHHVGVEEPRR

SEQ ID NO: 5082 - protein, 11 aa, Artificial
  IGFBP-2 heparin binding domain-containing peptide sequence
RHHVGVEEPRR

SEQ ID NO: 5083 - protein, 11 aa, Artificial
  IGFBP-2 heparin binding domain-containing peptide sequence
HHHVGVEEPRR

SEQ ID NO: 5084 - protein, 11 aa, Artificial
  IGFBP-2 heparin binding domain-containing peptide sequence
KKHVGVEEPRR

SEQ ID NO: 5085 - protein, 11 aa, Artificial
  IGFBP-2 heparin binding domain-containing peptide sequence
RKHVGVEEPRR

SEQ ID NO: 5086 - protein, 11 aa, Artificial
  IGFBP-2 heparin binding domain-containing peptide sequence
HKHVGVEEPRR

SEQ ID NO: 5087 - protein, 11 aa, Artificial
  IGFBP-2 heparin binding domain-containing peptide sequence
KRHVGVEEPRR

SEQ ID NO: 5088 - protein, 11 aa, Artificial
  IGFBP-2 heparin binding domain-containing peptide sequence
RRHVGVEEPRR

SEQ ID NO: 5089 - protein, 11 aa, Artificial
  IGFBP-2 heparin binding domain-containing peptide sequence
HRHVGVEEPRR

SEQ ID NO: 5090 - protein, 11 aa, Artificial
  IGFBP-2 heparin binding domain-containing peptide sequence
KHKVGVEEPRR

SEQ ID NO: 5091 - protein, 11 aa, Artificial
  IGFBP-2 heparin binding domain-containing peptide sequence
RHKVGVEEPRR

SEQ ID NO: 5092 - protein, 11 aa, Artificial
  IGFBP-2 heparin binding domain-containing peptide sequence
HHKVGVEEPRR

SEQ ID NO: 5093 - protein, 11 aa, Artificial
  IGFBP-2 heparin binding domain-containing peptide sequence
KKKVGVEEPRR

SEQ ID NO: 5094 - protein, 11 aa, Artificial
  IGFBP-2 heparin binding domain-containing peptide sequence
RKKVGVEEPRR

SEQ ID NO: 5095 - protein, 11 aa, Artificial
  IGFBP-2 heparin binding domain-containing peptide sequence
HKKVGVEEPRR

SEQ ID NO: 5096 - protein, 11 aa, Artificial
  IGFBP-2 heparin binding domain-containing peptide sequence
KRKVGVEEPRR

SEQ ID NO: 5097 - protein, 11 aa, Artificial
  IGFBP-2 heparin binding domain-containing peptide sequence
RRKVGVEEPRR

SEQ ID NO: 5098 - protein, 11 aa, Artificial
  IGFBP-2 heparin binding domain-containing peptide sequence
HRKVGVEEPRR

SEQ ID NO: 5099 - protein, 11 aa, Artificial
  IGFBP-2 heparin binding domain-containing peptide sequence
KHRVGVEEPRR

SEQ ID NO: 5100 - protein, 11 aa, Artificial
  IGFBP-2 heparin binding domain-containing peptide sequence
RHRVGVEEPRR

SEQ ID NO: 5101 - protein, 11 aa, Artificial
  IGFBP-2 heparin binding domain-containing peptide sequence
HHRVGVEEPRR

SEQ ID NO: 5102 - protein, 11 aa, Artificial
  IGFBP-2 heparin binding domain-containing peptide sequence
KKRVGVEEPRR

SEQ ID NO: 5103 - protein, 11 aa, Artificial
  IGFBP-2 heparin binding domain-containing peptide sequence
RKRVGVEEPRR

SEQ ID NO: 5104 - protein, 11 aa, Artificial
  IGFBP-2 heparin binding domain-containing peptide sequence
HKRVGVEEPRR

SEQ ID NO: 5105 - protein, 11 aa, Artificial
  IGFBP-2 heparin binding domain-containing peptide sequence
KRRVGVEEPRR

SEQ ID NO: 5106 - protein, 11 aa, Artificial
  IGFBP-2 heparin binding domain-containing peptide sequence
RRRVGVEEPRR

SEQ ID NO: 5107 - protein, 11 aa, Artificial
  IGFBP-2 heparin binding domain-containing peptide sequence
HRRVGVEEPRR

SEQ ID NO: 5108 - protein, 11 aa, Artificial
  IGFBP-2 heparin binding domain-containing peptide sequence
KHHLGLNEPRR

SEQ ID NO: 5109 - protein, 11 aa, Artificial
  IGFBP-2 heparin binding domain-containing peptide sequence
RHHLGLNEPRR

SEQ ID NO: 5110 - protein, 11 aa, Artificial
  IGFBP-2 heparin binding domain-containing peptide sequence
HHHLGLNEPRR

SEQ ID NO: 5111 - protein, 11 aa, Artificial
  IGFBP-2 heparin binding domain-containing peptide sequence
KKHLGLNEPRR

SEQ ID NO: 5112 - protein, 11 aa, Artificial
  IGFBP-2 heparin binding domain-containing peptide sequence
RKHLGLNEPRR

SEQ ID NO: 5113 - protein, 11 aa, Artificial
  IGFBP-2 heparin binding domain-containing peptide sequence
HKHLGLNEPRR

SEQ ID NO: 5114 - protein, 11 aa, Artificial
  IGFBP-2 heparin binding domain-containing peptide sequence
KRHLGLNEPRR

SEQ ID NO: 5115 - protein, 11 aa, Artificial
  IGFBP-2 heparin binding domain-containing peptide sequence
RRHLGLNEPRR

SEQ ID NO: 5116 - protein, 11 aa, Artificial
  IGFBP-2 heparin binding domain-containing peptide sequence
HRHLGLNEPRR

SEQ ID NO: 5117 - protein, 11 aa, Artificial
  IGFBP-2 heparin binding domain-containing peptide sequence
KHKLGLNEPRR

SEQ ID NO: 5118 - protein, 11 aa, Artificial
  IGFBP-2 heparin binding domain-containing peptide sequence
RHKLGLNEPRR

SEQ ID NO: 5119 - protein, 11 aa, Artificial
  IGFBP-2 heparin binding domain-containing peptide sequence
HHKLGLNEPRR

SEQ ID NO: 5120 - protein, 11 aa, Artificial
  IGFBP-2 heparin binding domain-containing peptide sequence
KKKLGLNEPRR

SEQ ID NO: 5121 - protein, 11 aa, Artificial
  IGFBP-2 heparin binding domain-containing peptide sequence
RKKLGLNEPRR

SEQ ID NO: 5122 - protein, 11 aa, Artificial
  IGFBP-2 heparin binding domain-containing peptide sequence
HKKLGLNEPRR

SEQ ID NO: 5123 - protein, 11 aa, Artificial
  IGFBP-2 heparin binding domain-containing peptide sequence
KRKLGLNEPRR

SEQ ID NO: 5124 - protein, 11 aa, Artificial
  IGFBP-2 heparin binding domain-containing peptide sequence
RRKLGLNEPRR

SEQ ID NO: 5125 - protein, 11 aa, Artificial
  IGFBP-2 heparin binding domain-containing peptide sequence
HRKLGLNEPRR

SEQ ID NO: 5126 - protein, 11 aa, Artificial
  IGFBP-2 heparin binding domain-containing peptide sequence
KHRLGLNEPRR

SEQ ID NO: 5127 - protein, 11 aa, Artificial
  IGFBP-2 heparin binding domain-containing peptide sequence
RHRLGLNEPRR

SEQ ID NO: 5128 - protein, 11 aa, Artificial
  IGFBP-2 heparin binding domain-containing peptide sequence
HHRLGLNEPRR

SEQ ID NO: 5129 - protein, 11 aa, Artificial
  IGFBP-2 heparin binding domain-containing peptide sequence
KKRLGLNEPRR

SEQ ID NO: 5130 - protein, 11 aa, Artificial
  IGFBP-2 heparin binding domain-containing peptide sequence
RKRLGLNEPRR

SEQ ID NO: 5131 - protein, 11 aa, Artificial
  IGFBP-2 heparin binding domain-containing peptide sequence
HKRLGLNEPRR

SEQ ID NO: 5132 - protein, 11 aa, Artificial
  IGFBP-2 heparin binding domain-containing peptide sequence
KRRLGLNEPRR

SEQ ID NO: 5133 - protein, 11 aa, Artificial
  IGFBP-2 heparin binding domain-containing peptide sequence
RRRLGLNEPRR

SEQ ID NO: 5134 - protein, 11 aa, Artificial
  IGFBP-2 heparin binding domain-containing peptide sequence
HRRLGLNEPRR

SEQ ID NO: 5135 - protein, 10 aa, Artificial
  IGFBP-2 heparin binding domain-containing peptide sequence
KHHIGLNPRR

SEQ ID NO: 5136 - protein, 11 aa, Artificial
  IGFBP-2 heparin binding domain-containing peptide sequence
RHHIGLNEPRR

SEQ ID NO: 5137 - protein, 11 aa, Artificial
  IGFBP-2 heparin binding domain-containing peptide sequence
HHHIGLNEPRR

SEQ ID NO: 5138 - protein, 11 aa, Artificial
  IGFBP-2 heparin binding domain-containing peptide sequence
KKHIGLNEPRR

SEQ ID NO: 5139 - protein, 11 aa, Artificial
  IGFBP-2 heparin binding domain-containing peptide sequence
RKHIGLNEPRR

SEQ ID NO: 5140 - protein, 11 aa, Artificial
  IGFBP-2 heparin binding domain-containing peptide sequence
HKHIGLNEPRR

SEQ ID NO: 5141 - protein, 11 aa, Artificial
  IGFBP-2 heparin binding domain-containing peptide sequence
KRHIGLNEPRR

SEQ ID NO: 5142 - protein, 11 aa, Artificial
  IGFBP-2 heparin binding domain-containing peptide sequence
RRHIGLNEPRR

SEQ ID NO: 5143 - protein, 11 aa, Artificial
  IGFBP-2 heparin binding domain-containing peptide sequence
HRHIGLNEPRR

SEQ ID NO: 5144 - protein, 11 aa, Artificial
  IGFBP-2 heparin binding domain-containing peptide sequence
KHKIGLNEPRR

SEQ ID NO: 5145 - protein, 11 aa, Artificial
  IGFBP-2 heparin binding domain-containing peptide sequence
RHKIGLNEPRR

SEQ ID NO: 5146 - protein, 11 aa, Artificial
  IGFBP-2 heparin binding domain-containing peptide sequence
HHKIGLNEPRR

SEQ ID NO: 5147 - protein, 11 aa, Artificial
  IGFBP-2 heparin binding domain-containing peptide sequence
KKKIGLNEPRR

SEQ ID NO: 5148 - protein, 11 aa, Artificial
  IGFBP-2 heparin binding domain-containing peptide sequence
RKKIGLNEPRR

SEQ ID NO: 5149 - protein, 11 aa, Artificial
  IGFBP-2 heparin binding domain-containing peptide sequence
HKKIGLNEPRR

SEQ ID NO: 5150 - protein, 11 aa, Artificial
  IGFBP-2 heparin binding domain-containing peptide sequence
KRKIGLNEPRR

SEQ ID NO: 5151 - protein, 11 aa, Artificial
  IGFBP-2 heparin binding domain-containing peptide sequence
RRKIGLNEPRR

SEQ ID NO: 5152 - protein, 11 aa, Artificial
  IGFBP-2 heparin binding domain-containing peptide sequence
HRKIGLNEPRR

SEQ ID NO: 5153 - protein, 11 aa, Artificial
  IGFBP-2 heparin binding domain-containing peptide sequence
KHRIGLNEPRR

SEQ ID NO: 5154 - protein, 11 aa, Artificial
  IGFBP-2 heparin binding domain-containing peptide sequence
RHRIGLNEPRR

SEQ ID NO: 5155 - protein, 11 aa, Artificial
  IGFBP-2 heparin binding domain-containing peptide sequence
HHRIGLNEPRR

SEQ ID NO: 5156 - protein, 11 aa, Artificial
  IGFBP-2 heparin binding domain-containing peptide sequence
KKRIGLNEPRR

SEQ ID NO: 5157 - protein, 11 aa, Artificial
  IGFBP-2 heparin binding domain-containing peptide sequence
RKRIGLNEPRR

SEQ ID NO: 5158 - protein, 11 aa, Artificial
  IGFBP-2 heparin binding domain-containing peptide sequence
HKRIGLNEPRR

SEQ ID NO: 5159 - protein, 11 aa, Artificial
  IGFBP-2 heparin binding domain-containing peptide sequence
KRRIGLNEPRR

SEQ ID NO: 5160 - protein, 11 aa, Artificial
  IGFBP-2 heparin binding domain-containing peptide sequence
RRRIGLNEPRR

SEQ ID NO: 5161 - protein, 11 aa, Artificial
  IGFBP-2 heparin binding domain-containing peptide sequence
HRRIGLNEPRR

SEQ ID NO: 5162 - protein, 11 aa, Artificial
  IGFBP-2 heparin binding domain-containing peptide sequence
KHHVGLNEPRR

SEQ ID NO: 5163 - protein, 11 aa, Artificial
  IGFBP-2 heparin binding domain-containing peptide sequence
RHHVGLNEPRR

SEQ ID NO: 5164 - protein, 11 aa, Artificial
  IGFBP-2 heparin binding domain-containing peptide sequence
HHHVGLNEPRR

SEQ ID NO: 5165 - protein, 11 aa, Artificial
  IGFBP-2 heparin binding domain-containing peptide sequence
KKHVGLNEPRR

SEQ ID NO: 5166 - protein, 11 aa, Artificial
  IGFBP-2 heparin binding domain-containing peptide sequence
RKHVGLNEPRR

SEQ ID NO: 5167 - protein, 11 aa, Artificial
  IGFBP-2 heparin binding domain-containing peptide sequence
HKHVGLNEPRR

SEQ ID NO: 5168 - protein, 11 aa, Artificial
  IGFBP-2 heparin binding domain-containing peptide sequence
KRHVGLNEPRR

SEQ ID NO: 5169 - protein, 11 aa, Artificial
  IGFBP-2 heparin binding domain-containing peptide sequence
RRHVGLNEPRR

SEQ ID NO: 5170 - protein, 11 aa, Artificial
  IGFBP-2 heparin binding domain-containing peptide sequence
HRHVGLNEPRR

SEQ ID NO: 5171 - protein, 11 aa, Artificial
  IGFBP-2 heparin binding domain-containing peptide sequence
KHKVGLNEPRR

SEQ ID NO: 5172 - protein, 11 aa, Artificial
  IGFBP-2 heparin binding domain-containing peptide sequence
RHKVGLNEPRR

SEQ ID NO: 5173 - protein, 11 aa, Artificial
  IGFBP-2 heparin binding domain-containing peptide sequence
HHKVGLNEPRR

SEQ ID NO: 5174 - protein, 11 aa, Artificial
  IGFBP-2 heparin binding domain-containing peptide sequence
KKKVGLNEPRR

SEQ ID NO: 5175 - protein, 11 aa, Artificial
  IGFBP-2 heparin binding domain-containing peptide sequence
RKKVGLNEPRR

SEQ ID NO: 5176 - protein, 11 aa, Artificial
  IGFBP-2 heparin binding domain-containing peptide sequence
HKKVGLNEPRR

SEQ ID NO: 5177 - protein, 11 aa, Artificial
  IGFBP-2 heparin binding domain-containing peptide sequence
KRKVGLNEPRR

SEQ ID NO: 5178 - protein, 11 aa, Artificial
  IGFBP-2 heparin binding domain-containing peptide sequence
RRKVGLNEPRR

SEQ ID NO: 5179 - protein, 11 aa, Artificial
  IGFBP-2 heparin binding domain-containing peptide sequence
HRKVGLNEPRR

SEQ ID NO: 5180 - protein, 11 aa, Artificial
  IGFBP-2 heparin binding domain-containing peptide sequence
KHRVGLNEPRR

SEQ ID NO: 5181 - protein, 11 aa, Artificial
  IGFBP-2 heparin binding domain-containing peptide sequence
RHRVGLNEPRR

SEQ ID NO: 5182 - protein, 11 aa, Artificial
  IGFBP-2 heparin binding domain-containing peptide sequence
HHRVGLNEPRR

SEQ ID NO: 5183 - protein, 11 aa, Artificial
  IGFBP-2 heparin binding domain-containing peptide sequence
KKRVGLNEPRR

SEQ ID NO: 5184 - protein, 11 aa, Artificial
  IGFBP-2 heparin binding domain-containing peptide sequence
RKRVGLNEPRR

SEQ ID NO: 5185 - protein, 11 aa, Artificial
  IGFBP-2 heparin binding domain-containing peptide sequence
HKRVGLNEPRR

SEQ ID NO: 5186 - protein, 11 aa, Artificial
  IGFBP-2 heparin binding domain-containing peptide sequence
KRRVGLNEPRR

SEQ ID NO: 5187 - protein, 11 aa, Artificial
  IGFBP-2 heparin binding domain-containing peptide sequence
RRRVGLNEPRR

SEQ ID NO: 5188 - protein, 11 aa, Artificial
  IGFBP-2 heparin binding domain-containing peptide sequence
HRRVGLNEPRR

SEQ ID NO: 5189 - protein, 11 aa, Artificial
  IGFBP-2 heparin binding domain-containing peptide sequence
KHHLGINEPRR

SEQ ID NO: 5190 - protein, 11 aa, Artificial
  IGFBP-2 heparin binding domain-containing peptide sequence
RHHLGINEPRR

SEQ ID NO: 5191 - protein, 11 aa, Artificial
  IGFBP-2 heparin binding domain-containing peptide sequence
HHHLGINEPRR

SEQ ID NO: 5192 - protein, 11 aa, Artificial
  IGFBP-2 heparin binding domain-containing peptide sequence
KKHLGINEPRR

SEQ ID NO: 5193 - protein, 11 aa, Artificial
  IGFBP-2 heparin binding domain-containing peptide sequence
RKHLGINEPRR

SEQ ID NO: 5194 - protein, 11 aa, Artificial
  IGFBP-2 heparin binding domain-containing peptide sequence
HKHLGINEPRR

SEQ ID NO: 5195 - protein, 11 aa, Artificial
  IGFBP-2 heparin binding domain-containing peptide sequence
KRHLGINEPRR

SEQ ID NO: 5196 - protein, 11 aa, Artificial
  IGFBP-2 heparin binding domain-containing peptide sequence
RRHLGINEPRR

SEQ ID NO: 5197 - protein, 11 aa, Artificial
  IGFBP-2 heparin binding domain-containing peptide sequence
HRHLGINEPRR

SEQ ID NO: 5198 - protein, 11 aa, Artificial
  IGFBP-2 heparin binding domain-containing peptide sequence
KHKLGINEPRR

SEQ ID NO: 5199 - protein, 11 aa, Artificial
  IGFBP-2 heparin binding domain-containing peptide sequence
RHKLGINEPRR

SEQ ID NO: 5200 - protein, 11 aa, Artificial
  IGFBP-2 heparin binding domain-containing peptide sequence
HHKLGINEPRR

SEQ ID NO: 5201 - protein, 11 aa, Artificial
  IGFBP-2 heparin binding domain-containing peptide sequence
KKKLGINEPRR

SEQ ID NO: 5202 - protein, 11 aa, Artificial
  IGFBP-2 heparin binding domain-containing peptide sequence
RKKLGINEPRR

SEQ ID NO: 5203 - protein, 11 aa, Artificial
  IGFBP-2 heparin binding domain-containing peptide sequence
HKKLGINEPRR

SEQ ID NO: 5204 - protein, 11 aa, Artificial
  IGFBP-2 heparin binding domain-containing peptide sequence
KRKLGINEPRR

SEQ ID NO: 5205 - protein, 11 aa, Artificial
  IGFBP-2 heparin binding domain-containing peptide sequence
RRKLGINEPRR

SEQ ID NO: 5206 - protein, 11 aa, Artificial
  IGFBP-2 heparin binding domain-containing peptide sequence
HRKLGINEPRR

SEQ ID NO: 5207 - protein, 11 aa, Artificial
  IGFBP-2 heparin binding domain-containing peptide sequence
KHRLGINEPRR

SEQ ID NO: 5208 - protein, 11 aa, Artificial
  IGFBP-2 heparin binding domain-containing peptide sequence
RHRLGINEPRR

SEQ ID NO: 5209 - protein, 11 aa, Artificial
  IGFBP-2 heparin binding domain-containing peptide sequence
HHRLGINEPRR

SEQ ID NO: 5210 - protein, 11 aa, Artificial
  IGFBP-2 heparin binding domain-containing peptide sequence
KKRLGINEPRR

SEQ ID NO: 5211 - protein, 11 aa, Artificial
  IGFBP-2 heparin binding domain-containing peptide sequence
RKRLGINEPRR

SEQ ID NO: 5212 - protein, 11 aa, Artificial
  IGFBP-2 heparin binding domain-containing peptide sequence
HKRLGINEPRR

SEQ ID NO: 5213 - protein, 11 aa, Artificial
  IGFBP-2 heparin binding domain-containing peptide sequence
KRRLGINEPRR

SEQ ID NO: 5214 - protein, 11 aa, Artificial
  IGFBP-2 heparin binding domain-containing peptide sequence
RRRLGINEPRR

SEQ ID NO: 5215 - protein, 11 aa, Artificial
  IGFBP-2 heparin binding domain-containing peptide sequence
HRRLGINEPRR

SEQ ID NO: 5216 - protein, 11 aa, Artificial
  IGFBP-2 heparin binding domain-containing peptide sequence
KHHIGIENPRR

SEQ ID NO: 5217 - protein, 11 aa, Artificial
  IGFBP-2 heparin binding domain-containing peptide sequence
RHHIGINEPRR

SEQ ID NO: 5218 - protein, 11 aa, Artificial
  IGFBP-2 heparin binding domain-containing peptide sequence
HHHIGINEPRR

SEQ ID NO: 5219 - protein, 11 aa, Artificial
  IGFBP-2 heparin binding domain-containing peptide sequence
KKHIGINEPRR

SEQ ID NO: 5220 - protein, 11 aa, Artificial
  IGFBP-2 heparin binding domain-containing peptide sequence
RKHIGINEPRR

SEQ ID NO: 5221 - protein, 11 aa, Artificial
  IGFBP-2 heparin binding domain-containing peptide sequence
HKHIGINEPRR

SEQ ID NO: 5222 - protein, 11 aa, Artificial
  IGFBP-2 heparin binding domain-containing peptide sequence
KRHIGINEPRR

SEQ ID NO: 5223 - protein, 11 aa, Artificial
  IGFBP-2 heparin binding domain-containing peptide sequence
RRHIGINEPRR

SEQ ID NO: 5224 - protein, 11 aa, Artificial
  IGFBP-2 heparin binding domain-containing peptide sequence
HRHIGINEPRR

SEQ ID NO: 5225 - protein, 11 aa, Artificial
  IGFBP-2 heparin binding domain-containing peptide sequence
KHKIGINEPRR

SEQ ID NO: 5226 - protein, 11 aa, Artificial
  IGFBP-2 heparin binding domain-containing peptide sequence
RHKIGINEPRR

SEQ ID NO: 5227 - protein, 11 aa, Artificial
  IGFBP-2 heparin binding domain-containing peptide sequence
HHKIGINEPRR

SEQ ID NO: 5228 - protein, 11 aa, Artificial
  IGFBP-2 heparin binding domain-containing peptide sequence
KKKIGINEPRR

SEQ ID NO: 5229 - protein, 11 aa, Artificial
  IGFBP-2 heparin binding domain-containing peptide sequence
RKKIGINEPRR

SEQ ID NO: 5230 - protein, 11 aa, Artificial
  IGFBP-2 heparin binding domain-containing peptide sequence
HKKIGINEPRR

SEQ ID NO: 5231 - protein, 11 aa, Artificial
  IGFBP-2 heparin binding domain-containing peptide sequence
KRKIGINEPRR

SEQ ID NO: 5232 - protein, 11 aa, Artificial
  IGFBP-2 heparin binding domain-containing peptide sequence
RRKIGINEPRR

SEQ ID NO: 5233 - protein, 11 aa, Artificial
  IGFBP-2 heparin binding domain-containing peptide sequence
HRKIGINEPRR

SEQ ID NO: 5234 - protein, 11 aa, Artificial
  IGFBP-2 heparin binding domain-containing peptide sequence
KHRIGINEPRR

SEQ ID NO: 5235 - protein, 11 aa, Artificial
  IGFBP-2 heparin binding domain-containing peptide sequence
RHRIGINEPRR

SEQ ID NO: 5236 - protein, 11 aa, Artificial
  IGFBP-2 heparin binding domain-containing peptide sequence
HHRIGINEPRR

SEQ ID NO: 5237 - protein, 11 aa, Artificial
  IGFBP-2 heparin binding domain-containing peptide sequence
KKRIGINEPRR

SEQ ID NO: 5238 - protein, 11 aa, Artificial
  IGFBP-2 heparin binding domain-containing peptide sequence
RKRIGINEPRR

SEQ ID NO: 5239 - protein, 11 aa, Artificial
  IGFBP-2 heparin binding domain-containing peptide sequence
HKRIGINEPRR

SEQ ID NO: 5240 - protein, 11 aa, Artificial
  IGFBP-2 heparin binding domain-containing peptide sequence
KRRIGINEPRR

SEQ ID NO: 5241 - protein, 11 aa, Artificial
  IGFBP-2 heparin binding domain-containing peptide sequence
RRRIGINEPRR

SEQ ID NO: 5242 - protein, 11 aa, Artificial
  IGFBP-2 heparin binding domain-containing peptide sequence
HRRIGINEPRR

SEQ ID NO: 5243 - protein, 11 aa, Artificial
  IGFBP-2 heparin binding domain-containing peptide sequence
KHHVGINEPRR

SEQ ID NO: 5244 - protein, 11 aa, Artificial
  IGFBP-2 heparin binding domain-containing peptide sequence
RHHVGINEPRR

SEQ ID NO: 5245 - protein, 11 aa, Artificial
  IGFBP-2 heparin binding domain-containing peptide sequence
HHHVGINEPRR

SEQ ID NO: 5246 - protein, 11 aa, Artificial
  IGFBP-2 heparin binding domain-containing peptide sequence
KKHVGINEPRR

SEQ ID NO: 5247 - protein, 11 aa, Artificial
  IGFBP-2 heparin binding domain-containing peptide sequence
RKHVGINEPRR

SEQ ID NO: 5248 - protein, 11 aa, Artificial
  IGFBP-2 heparin binding domain-containing peptide sequence
HKHVGINEPRR

SEQ ID NO: 5249 - protein, 11 aa, Artificial
  IGFBP-2 heparin binding domain-containing peptide sequence
KRHVGINEPRR

SEQ ID NO: 5250 - protein, 11 aa, Artificial
  IGFBP-2 heparin binding domain-containing peptide sequence
RRHVGINEPRR

SEQ ID NO: 5251 - protein, 11 aa, Artificial
  IGFBP-2 heparin binding domain-containing peptide sequence
HRHVGINEPRR

SEQ ID NO: 5252 - protein, 11 aa, Artificial
  IGFBP-2 heparin binding domain-containing peptide sequence
KHKVGINEPRR

SEQ ID NO: 5253 - protein, 11 aa, Artificial
  IGFBP-2 heparin binding domain-containing peptide sequence
RHKVGINEPRR

SEQ ID NO: 5254 - protein, 11 aa, Artificial
  IGFBP-2 heparin binding domain-containing peptide sequence
HHKVGINEPRR

SEQ ID NO: 5255 - protein, 11 aa, Artificial
  IGFBP-2 heparin binding domain-containing peptide sequence
KKKVGINEPRR

SEQ ID NO: 5256 - protein, 11 aa, Artificial
  IGFBP-2 heparin binding domain-containing peptide sequence
RKKVGINEPRR

SEQ ID NO: 5257 - protein, 11 aa, Artificial
  IGFBP-2 heparin binding domain-containing peptide sequence
HKKVGINEPRR

SEQ ID NO: 5258 - protein, 11 aa, Artificial
  IGFBP-2 heparin binding domain-containing peptide sequence
KRKVGINEPRR

SEQ ID NO: 5259 - protein, 11 aa, Artificial
  IGFBP-2 heparin binding domain-containing peptide sequence
RRKVGINEPRR

SEQ ID NO: 5260 - protein, 11 aa, Artificial
  IGFBP-2 heparin binding domain-containing peptide sequence
HRKVGINEPRR

SEQ ID NO: 5261 - protein, 11 aa, Artificial
  IGFBP-2 heparin binding domain-containing peptide sequence
KHRVGINEPRR

SEQ ID NO: 5262 - protein, 11 aa, Artificial
  IGFBP-2 heparin binding domain-containing peptide sequence
RHRVGINEPRR

SEQ ID NO: 5263 - protein, 11 aa, Artificial
  IGFBP-2 heparin binding domain-containing peptide sequence
HHRVGINEPRR

SEQ ID NO: 5264 - protein, 11 aa, Artificial
  IGFBP-2 heparin binding domain-containing peptide sequence
KKRVGINEPRR

SEQ ID NO: 5265 - protein, 11 aa, Artificial
  IGFBP-2 heparin binding domain-containing peptide sequence
RKRVGINEPRR

SEQ ID NO: 5266 - protein, 11 aa, Artificial
  IGFBP-2 heparin binding domain-containing peptide sequence
HKRVGINEPRR

SEQ ID NO: 5267 - protein, 11 aa, Artificial
  IGFBP-2 heparin binding domain-containing peptide sequence
KRRVGINEPRR

SEQ ID NO: 5268 - protein, 11 aa, Artificial
  IGFBP-2 heparin binding domain-containing peptide sequence
RRRVGINEPRR

SEQ ID NO: 5269 - protein, 11 aa, Artificial
  IGFBP-2 heparin binding domain-containing peptide sequence
HRRVGINEPRR

SEQ ID NO: 5270 - protein, 11 aa, Artificial
  IGFBP-2 heparin binding domain-containing peptide sequence
KHHLGVNEPRR

SEQ ID NO: 5271 - protein, 11 aa, Artificial
  IGFBP-2 heparin binding domain-containing peptide sequence
RHHLGVNEPRR

SEQ ID NO: 5272 - protein, 11 aa, Artificial
  IGFBP-2 heparin binding domain-containing peptide sequence
HHHLGVNEPRR

SEQ ID NO: 5273 - protein, 11 aa, Artificial
  IGFBP-2 heparin binding domain-containing peptide sequence
KKHLGVNEPRR

SEQ ID NO: 5274 - protein, 11 aa, Artificial
  IGFBP-2 heparin binding domain-containing peptide sequence
RKHLGVNEPRR

SEQ ID NO: 5275 - protein, 11 aa, Artificial
  IGFBP-2 heparin binding domain-containing peptide sequence
HKHLGVNEPRR

SEQ ID NO: 5276 - protein, 11 aa, Artificial
  IGFBP-2 heparin binding domain-containing peptide sequence
KRHLGVNEPRR

SEQ ID NO: 5277 - protein, 11 aa, Artificial
  IGFBP-2 heparin binding domain-containing peptide sequence
RRHLGVNEPRR

SEQ ID NO: 5278 - protein, 11 aa, Artificial
  IGFBP-2 heparin binding domain-containing peptide sequence
HRHLGVNEPRR

SEQ ID NO: 5279 - protein, 11 aa, Artificial
  IGFBP-2 heparin binding domain-containing peptide sequence
KHKLGVNEPRR

SEQ ID NO: 5280 - protein, 11 aa, Artificial
  IGFBP-2 heparin binding domain-containing peptide sequence
RHKLGVNEPRR

SEQ ID NO: 5281 - protein, 11 aa, Artificial
  IGFBP-2 heparin binding domain-containing peptide sequence
HHKLGVNEPRR

SEQ ID NO: 5282 - protein, 11 aa, Artificial
  IGFBP-2 heparin binding domain-containing peptide sequence
KKKLGVNEPRR

SEQ ID NO: 5283 - protein, 11 aa, Artificial
  IGFBP-2 heparin binding domain-containing peptide sequence
RKKLGVNEPRR

SEQ ID NO: 5284 - protein, 11 aa, Artificial
  IGFBP-2 heparin binding domain-containing peptide sequence
HKKLGVNEPRR

SEQ ID NO: 5285 - protein, 11 aa, Artificial
  IGFBP-2 heparin binding domain-containing peptide sequence
KRKLGVNEPRR

SEQ ID NO: 5286 - protein, 11 aa, Artificial
  IGFBP-2 heparin binding domain-containing peptide sequence
RRKLGVNEPRR

SEQ ID NO: 5287 - protein, 11 aa, Artificial
  IGFBP-2 heparin binding domain-containing peptide sequence
HRKLGVNEPRR

SEQ ID NO: 5288 - protein, 11 aa, Artificial
  IGFBP-2 heparin binding domain-containing peptide sequence
KHRLGVNEPRR

SEQ ID NO: 5289 - protein, 11 aa, Artificial
  IGFBP-2 heparin binding domain-containing peptide sequence
RHRLGVNEPRR

SEQ ID NO: 5290 - protein, 11 aa, Artificial
  IGFBP-2 heparin binding domain-containing peptide sequence
HHRLGVNEPRR

SEQ ID NO: 5291 - protein, 11 aa, Artificial
  IGFBP-2 heparin binding domain-containing peptide sequence
KKRLGVNEPRR

SEQ ID NO: 5292 - protein, 11 aa, Artificial
  IGFBP-2 heparin binding domain-containing peptide sequence
RKRLGVNEPRR

SEQ ID NO: 5293 - protein, 11 aa, Artificial
  IGFBP-2 heparin binding domain-containing peptide sequence
HKRLGVNEPRR

SEQ ID NO: 5294 - protein, 11 aa, Artificial
  IGFBP-2 heparin binding domain-containing peptide sequence
KRRLGVNEPRR

SEQ ID NO: 5295 - protein, 11 aa, Artificial
  IGFBP-2 heparin binding domain-containing peptide sequence
RRRLGVNEPRR

SEQ ID NO: 5296 - protein, 11 aa, Artificial
  IGFBP-2 heparin binding domain-containing peptide sequence
HRRLGVNEPRR

SEQ ID NO: 5297 - protein, 11 aa, Artificial
  IGFBP-2 heparin binding domain-containing peptide sequence
KHHIGVNEPRR

SEQ ID NO: 5298 - protein, 11 aa, Artificial
  IGFBP-2 heparin binding domain-containing peptide sequence
RHHIGVNEPRR

SEQ ID NO: 5299 - protein, 11 aa, Artificial
  IGFBP-2 heparin binding domain-containing peptide sequence
HHHIGVNEPRR

SEQ ID NO: 5300 - protein, 11 aa, Artificial
  IGFBP-2 heparin binding domain-containing peptide sequence
KKHIGVNEPRR

SEQ ID NO: 5301 - protein, 11 aa, Artificial
  IGFBP-2 heparin binding domain-containing peptide sequence
RKHIGVNEPRR

SEQ ID NO: 5302 - protein, 11 aa, Artificial
  IGFBP-2 heparin binding domain-containing peptide sequence
HKHIGVNEPRR

SEQ ID NO: 5303 - protein, 11 aa, Artificial
  IGFBP-2 heparin binding domain-containing peptide sequence
KRHIGVNEPRR

SEQ ID NO: 5304 - protein, 11 aa, Artificial
  IGFBP-2 heparin binding domain-containing peptide sequence
RRHIGVNEPRR

SEQ ID NO: 5305 - protein, 11 aa, Artificial
  IGFBP-2 heparin binding domain-containing peptide sequence
HRHIGVNEPRR

SEQ ID NO: 5306 - protein, 11 aa, Artificial
  IGFBP-2 heparin binding domain-containing peptide sequence
KHKIGVNEPRR

SEQ ID NO: 5307 - protein, 11 aa, Artificial
  IGFBP-2 heparin binding domain-containing peptide sequence
RHKIGVNEPRR

SEQ ID NO: 5308 - protein, 11 aa, Artificial
  IGFBP-2 heparin binding domain-containing peptide sequence
HHKIGVNEPRR

SEQ ID NO: 5309 - protein, 11 aa, Artificial
  IGFBP-2 heparin binding domain-containing peptide sequence
KKKIGVNEPRR

SEQ ID NO: 5310 - protein, 11 aa, Artificial
  IGFBP-2 heparin binding domain-containing peptide sequence
RKKIGVNEPRR

SEQ ID NO: 5311 - protein, 11 aa, Artificial
  IGFBP-2 heparin binding domain-containing peptide sequence
HKKIGVNEPRR

SEQ ID NO: 5312 - protein, 11 aa, Artificial
  IGFBP-2 heparin binding domain-containing peptide sequence
KRKIGVNEPRR

SEQ ID NO: 5313 - protein, 11 aa, Artificial
  IGFBP-2 heparin binding domain-containing peptide sequence
RRKIGVNEPRR

SEQ ID NO: 5314 - protein, 11 aa, Artificial
  IGFBP-2 heparin binding domain-containing peptide sequence
HRKIGVNEPRR

SEQ ID NO: 5315 - protein, 11 aa, Artificial
  IGFBP-2 heparin binding domain-containing peptide sequence
KHRIGVNEPRR

SEQ ID NO: 5316 - protein, 11 aa, Artificial
  IGFBP-2 heparin binding domain-containing peptide sequence
RHRIGVNEPRR

SEQ ID NO: 5317 - protein, 11 aa, Artificial
  IGFBP-2 heparin binding domain-containing peptide sequence
HHRIGVNEPRR

SEQ ID NO: 5318 - protein, 11 aa, Artificial
  IGFBP-2 heparin binding domain-containing peptide sequence
KKRIGVNEPRR

SEQ ID NO: 5319 - protein, 11 aa, Artificial
  IGFBP-2 heparin binding domain-containing peptide sequence
RKRIGVNEPRR

SEQ ID NO: 5320 - protein, 11 aa, Artificial
  IGFBP-2 heparin binding domain-containing peptide sequence
HKRIGVNEPRR

SEQ ID NO: 5321 - protein, 11 aa, Artificial
  IGFBP-2 heparin binding domain-containing peptide sequence
KRRIGVNEPRR

SEQ ID NO: 5322 - protein, 11 aa, Artificial
  IGFBP-2 heparin binding domain-containing peptide sequence
RRRIGVNEPRR

SEQ ID NO: 5323 - protein, 11 aa, Artificial
  IGFBP-2 heparin binding domain-containing peptide sequence
HRRIGVNEPRR

SEQ ID NO: 5324 - protein, 11 aa, Artificial
  IGFBP-2 heparin binding domain-containing peptide sequence
KHHVGVNEPRR

SEQ ID NO: 5325 - protein, 11 aa, Artificial
  IGFBP-2 heparin binding domain-containing peptide sequence
RHHVGVNEPRR

SEQ ID NO: 5326 - protein, 11 aa, Artificial
  IGFBP-2 heparin binding domain-containing peptide sequence
HHHVGVNEPRR

SEQ ID NO: 5327 - protein, 11 aa, Artificial
  IGFBP-2 heparin binding domain-containing peptide sequence
KKHVGVNEPRR

SEQ ID NO: 5328 - protein, 11 aa, Artificial
  IGFBP-2 heparin binding domain-containing peptide sequence
RKHVGVNEPRR

SEQ ID NO: 5329 - protein, 11 aa, Artificial
  IGFBP-2 heparin binding domain-containing peptide sequence
HKHVGVNEPRR

SEQ ID NO: 5330 - protein, 11 aa, Artificial
  IGFBP-2 heparin binding domain-containing peptide sequence
KRHVGVNEPRR

SEQ ID NO: 5331 - protein, 11 aa, Artificial
  IGFBP-2 heparin binding domain-containing peptide sequence
RRHVGVNEPRR

SEQ ID NO: 5332 - protein, 11 aa, Artificial
  IGFBP-2 heparin binding domain-containing peptide sequence
HRHVGVNEPRR

SEQ ID NO: 5333 - protein, 11 aa, Artificial
  IGFBP-2 heparin binding domain-containing peptide sequence
KHKVGVNEPRR

SEQ ID NO: 5334 - protein, 11 aa, Artificial
  IGFBP-2 heparin binding domain-containing peptide sequence
RHKVGVNEPRR

SEQ ID NO: 5335 - protein, 11 aa, Artificial
  IGFBP-2 heparin binding domain-containing peptide sequence
HHKVGVNEPRR

SEQ ID NO: 5336 - protein, 11 aa, Artificial
  IGFBP-2 heparin binding domain-containing peptide sequence
KKKVGVNEPRR

SEQ ID NO: 5337 - protein, 11 aa, Artificial
  IGFBP-2 heparin binding domain-containing peptide sequence
RKKVGVNEPRR

SEQ ID NO: 5338 - protein, 11 aa, Artificial
  IGFBP-2 heparin binding domain-containing peptide sequence
HKKVGVNEPRR

SEQ ID NO: 5339 - protein, 11 aa, Artificial
  IGFBP-2 heparin binding domain-containing peptide sequence
KRKVGVNEPRR

SEQ ID NO: 5340 - protein, 11 aa, Artificial
  IGFBP-2 heparin binding domain-containing peptide sequence
RRKVGVNEPRR

SEQ ID NO: 5341 - protein, 11 aa, Artificial
  IGFBP-2 heparin binding domain-containing peptide sequence
HRKVGVNEPRR

SEQ ID NO: 5342 - protein, 11 aa, Artificial
  IGFBP-2 heparin binding domain-containing peptide sequence
KHRVGVNEPRR

SEQ ID NO: 5343 - protein, 11 aa, Artificial
  IGFBP-2 heparin binding domain-containing peptide sequence
RHRVGVNEPRR

SEQ ID NO: 5344 - protein, 11 aa, Artificial
  IGFBP-2 heparin binding domain-containing peptide sequence
HHRVGVNEPRR

SEQ ID NO: 5345 - protein, 11 aa, Artificial
  IGFBP-2 heparin binding domain-containing peptide sequence
KKRVGVNEPRR

SEQ ID NO: 5346 - protein, 11 aa, Artificial
  IGFBP-2 heparin binding domain-containing peptide sequence
RKRVGVNEPRR

SEQ ID NO: 5347 - protein, 11 aa, Artificial
  IGFBP-2 heparin binding domain-containing peptide sequence
HKRVGVNEPRR

SEQ ID NO: 5348 - protein, 11 aa, Artificial
  IGFBP-2 heparin binding domain-containing peptide sequence
KRRVGVNEPRR

SEQ ID NO: 5349 - protein, 11 aa, Artificial
  IGFBP-2 heparin binding domain-containing peptide sequence
RRRVGVNEPRR

SEQ ID NO: 5350 - protein, 11 aa, Artificial
  IGFBP-2 heparin binding domain-containing peptide sequence
HRRVGVNEPRR

SEQ ID NO: 5351 - protein, 11 aa, Artificial
  IGFBP-2 heparin binding domain-containing peptide sequence
KHHLGLENPRR

SEQ ID NO: 5352 - protein, 11 aa, Artificial
  IGFBP-2 heparin binding domain-containing peptide sequence
RHHLGLENPRR

SEQ ID NO: 5353 - protein, 11 aa, Artificial
  IGFBP-2 heparin binding domain-containing peptide sequence
HHHLGLENPRR

SEQ ID NO: 5354 - protein, 11 aa, Artificial
  IGFBP-2 heparin binding domain-containing peptide sequence
KKHLGLENPRR

SEQ ID NO: 5355 - protein, 11 aa, Artificial
  IGFBP-2 heparin binding domain-containing peptide sequence
RKHLGLENPRR

SEQ ID NO: 5356 - protein, 11 aa, Artificial
  IGFBP-2 heparin binding domain-containing peptide sequence
HKHLGLENPRR

SEQ ID NO: 5357 - protein, 11 aa, Artificial
  IGFBP-2 heparin binding domain-containing peptide sequence
KRHLGLENPRR

SEQ ID NO: 5358 - protein, 11 aa, Artificial
  IGFBP-2 heparin binding domain-containing peptide sequence
RRHLGLENPRR

SEQ ID NO: 5359 - protein, 11 aa, Artificial
  IGFBP-2 heparin binding domain-containing peptide sequence
HRHLGLENPRR

SEQ ID NO: 5360 - protein, 11 aa, Artificial
  IGFBP-2 heparin binding domain-containing peptide sequence
KHKLGLENPRR

SEQ ID NO: 5361 - protein, 11 aa, Artificial
  IGFBP-2 heparin binding domain-containing peptide sequence
RHKLGLENPRR

SEQ ID NO: 5362 - protein, 11 aa, Artificial
  IGFBP-2 heparin binding domain-containing peptide sequence
HHKLGLENPRR

SEQ ID NO: 5363 - protein, 11 aa, Artificial
  IGFBP-2 heparin binding domain-containing peptide sequence
KKKLGLENPRR

SEQ ID NO: 5364 - protein, 11 aa, Artificial
  IGFBP-2 heparin binding domain-containing peptide sequence
RKKLGLENPRR

SEQ ID NO: 5365 - protein, 11 aa, Artificial
  IGFBP-2 heparin binding domain-containing peptide sequence
HKKLGLENPRR

SEQ ID NO: 5366 - protein, 11 aa, Artificial
  IGFBP-2 heparin binding domain-containing peptide sequence
KRKLGLENPRR

SEQ ID NO: 5367 - protein, 11 aa, Artificial
  IGFBP-2 heparin binding domain-containing peptide sequence
RRKLGLENPRR

SEQ ID NO: 5368 - protein, 11 aa, Artificial
  IGFBP-2 heparin binding domain-containing peptide sequence
HRKLGLENPRR

SEQ ID NO: 5369 - protein, 11 aa, Artificial
  IGFBP-2 heparin binding domain-containing peptide sequence
KHRLGLENPRR

SEQ ID NO: 5370 - protein, 11 aa, Artificial
  IGFBP-2 heparin binding domain-containing peptide sequence
RHRLGLENPRR

SEQ ID NO: 5371 - protein, 11 aa, Artificial
  IGFBP-2 heparin binding domain-containing peptide sequence
HHRLGLENPRR

SEQ ID NO: 5372 - protein, 11 aa, Artificial
  IGFBP-2 heparin binding domain-containing peptide sequence
KKRLGLENPRR

SEQ ID NO: 5373 - protein, 11 aa, Artificial
  IGFBP-2 heparin binding domain-containing peptide sequence
RKRLGLENPRR

SEQ ID NO: 5374 - protein, 11 aa, Artificial
  IGFBP-2 heparin binding domain-containing peptide sequence
HKRLGLENPRR

SEQ ID NO: 5375 - protein, 11 aa, Artificial
  IGFBP-2 heparin binding domain-containing peptide sequence
KRRLGLENPRR

SEQ ID NO: 5376 - protein, 11 aa, Artificial
  IGFBP-2 heparin binding domain-containing peptide sequence
RRRLGLENPRR

SEQ ID NO: 5377 - protein, 11 aa, Artificial
  IGFBP-2 heparin binding domain-containing peptide sequence
HRRLGLENPRR

SEQ ID NO: 5378 - protein, 11 aa, Artificial
  IGFBP-2 heparin binding domain-containing peptide sequence
KHHIGLENPRR

SEQ ID NO: 5379 - protein, 11 aa, Artificial
  IGFBP-2 heparin binding domain-containing peptide sequence
RHHIGLENPRR

SEQ ID NO: 5380 - protein, 11 aa, Artificial
  IGFBP-2 heparin binding domain-containing peptide sequence
HHHIGLENPRR

SEQ ID NO: 5381 - protein, 11 aa, Artificial
  IGFBP-2 heparin binding domain-containing peptide sequence
KKHIGLENPRR

SEQ ID NO: 5382 - protein, 11 aa, Artificial
  IGFBP-2 heparin binding domain-containing peptide sequence
RKHIGLENPRR

SEQ ID NO: 5383 - protein, 11 aa, Artificial
  IGFBP-2 heparin binding domain-containing peptide sequence
HKHIGLENPRR

SEQ ID NO: 5384 - protein, 11 aa, Artificial
  IGFBP-2 heparin binding domain-containing peptide sequence
KRHIGLENPRR

SEQ ID NO: 5385 - protein, 11 aa, Artificial
  IGFBP-2 heparin binding domain-containing peptide sequence
RRHIGLENPRR

SEQ ID NO: 5386 - protein, 11 aa, Artificial
  IGFBP-2 heparin binding domain-containing peptide sequence
HRHIGLENPRR

SEQ ID NO: 5387 - protein, 11 aa, Artificial
  IGFBP-2 heparin binding domain-containing peptide sequence
KHKIGLENPRR

SEQ ID NO: 5388 - protein, 11 aa, Artificial
  IGFBP-2 heparin binding domain-containing peptide sequence
RHKIGLENPRR

SEQ ID NO: 5389 - protein, 11 aa, Artificial
  IGFBP-2 heparin binding domain-containing peptide sequence
HHKIGLENPRR

SEQ ID NO: 5390 - protein, 11 aa, Artificial
  IGFBP-2 heparin binding domain-containing peptide sequence
KKKIGLENPRR

SEQ ID NO: 5391 - protein, 11 aa, Artificial
  IGFBP-2 heparin binding domain-containing peptide sequence
RKKIGLENPRR

SEQ ID NO: 5392 - protein, 11 aa, Artificial
  IGFBP-2 heparin binding domain-containing peptide sequence
HKKIGLENPRR

SEQ ID NO: 5393 - protein, 11 aa, Artificial
  IGFBP-2 heparin binding domain-containing peptide sequence
KRKIGLENPRR

SEQ ID NO: 5394 - protein, 11 aa, Artificial
  IGFBP-2 heparin binding domain-containing peptide sequence
RRKIGLENPRR

SEQ ID NO: 5395 - protein, 11 aa, Artificial
  IGFBP-2 heparin binding domain-containing peptide sequence
HRKIGLENPRR

SEQ ID NO: 5396 - protein, 11 aa, Artificial
  IGFBP-2 heparin binding domain-containing peptide sequence
KHRIGLENPRR

SEQ ID NO: 5397 - protein, 11 aa, Artificial
  IGFBP-2 heparin binding domain-containing peptide sequence
RHRIGLENPRR

SEQ ID NO: 5398 - protein, 11 aa, Artificial
  IGFBP-2 heparin binding domain-containing peptide sequence
HHRIGLENPRR

SEQ ID NO: 5399 - protein, 11 aa, Artificial
  IGFBP-2 heparin binding domain-containing peptide sequence
KKRIGLENPRR

SEQ ID NO: 5400 - protein, 11 aa, Artificial
  IGFBP-2 heparin binding domain-containing peptide sequence
RKRIGLENPRR

SEQ ID NO: 5401 - protein, 11 aa, Artificial
  IGFBP-2 heparin binding domain-containing peptide sequence
HKRIGLENPRR

SEQ ID NO: 5402 - protein, 11 aa, Artificial
  IGFBP-2 heparin binding domain-containing peptide sequence
KRRIGLENPRR

SEQ ID NO: 5403 - protein, 11 aa, Artificial
  IGFBP-2 heparin binding domain-containing peptide sequence
RRRIGLENPRR

SEQ ID NO: 5404 - protein, 11 aa, Artificial
  IGFBP-2 heparin binding domain-containing peptide sequence
HRRIGLENPRR

SEQ ID NO: 5405 - protein, 11 aa, Artificial
  IGFBP-2 heparin binding domain-containing peptide sequence
KHHVGLENPRR

SEQ ID NO: 5406 - protein, 11 aa, Artificial
  IGFBP-2 heparin binding domain-containing peptide sequence
RHHVGLENPRR

SEQ ID NO: 5407 - protein, 11 aa, Artificial
  IGFBP-2 heparin binding domain-containing peptide sequence
HHHVGLENPRR

SEQ ID NO: 5408 - protein, 11 aa, Artificial
  IGFBP-2 heparin binding domain-containing peptide sequence
KKHVGLENPRR

SEQ ID NO: 5409 - protein, 11 aa, Artificial
  IGFBP-2 heparin binding domain-containing peptide sequence
RKHVGLENPRR

SEQ ID NO: 5410 - protein, 11 aa, Artificial
  IGFBP-2 heparin binding domain-containing peptide sequence
HKHVGLENPRR

SEQ ID NO: 5411 - protein, 11 aa, Artificial
  IGFBP-2 heparin binding domain-containing peptide sequence
KRHVGLENPRR

SEQ ID NO: 5412 - protein, 11 aa, Artificial
  IGFBP-2 heparin binding domain-containing peptide sequence
RRHVGLENPRR

SEQ ID NO: 5413 - protein, 11 aa, Artificial
  IGFBP-2 heparin binding domain-containing peptide sequence
HRHVGLENPRR

SEQ ID NO: 5414 - protein, 11 aa, Artificial
  IGFBP-2 heparin binding domain-containing peptide sequence
KHKVGLENPRR

SEQ ID NO: 5415 - protein, 11 aa, Artificial
  IGFBP-2 heparin binding domain-containing peptide sequence
RHKVGLENPRR

SEQ ID NO: 5416 - protein, 11 aa, Artificial
  IGFBP-2 heparin binding domain-containing peptide sequence
HHKVGLENPRR

SEQ ID NO: 5417 - protein, 11 aa, Artificial
  IGFBP-2 heparin binding domain-containing peptide sequence
KKKVGLENPRR

SEQ ID NO: 5418 - protein, 11 aa, Artificial
  IGFBP-2 heparin binding domain-containing peptide sequence
RKKVGLENPRR

SEQ ID NO: 5419 - protein, 11 aa, Artificial
  IGFBP-2 heparin binding domain-containing peptide sequence
HKKVGLENPRR

SEQ ID NO: 5420 - protein, 11 aa, Artificial
  IGFBP-2 heparin binding domain-containing peptide sequence
KRKVGLENPRR

SEQ ID NO: 5421 - protein, 11 aa, Artificial
  IGFBP-2 heparin binding domain-containing peptide sequence
RRKVGLENPRR

SEQ ID NO: 5422 - protein, 11 aa, Artificial
  IGFBP-2 heparin binding domain-containing peptide sequence
HRKVGLENPRR

SEQ ID NO: 5423 - protein, 11 aa, Artificial
  IGFBP-2 heparin binding domain-containing peptide sequence
KHRVGLENPRR

SEQ ID NO: 5424 - protein, 11 aa, Artificial
  IGFBP-2 heparin binding domain-containing peptide sequence
RHRVGLENPRR

SEQ ID NO: 5425 - protein, 11 aa, Artificial
  IGFBP-2 heparin binding domain-containing peptide sequence
HHRVGLENPRR

SEQ ID NO: 5426 - protein, 11 aa, Artificial
  IGFBP-2 heparin binding domain-containing peptide sequence
KKRVGLENPRR

SEQ ID NO: 5427 - protein, 11 aa, Artificial
  IGFBP-2 heparin binding domain-containing peptide sequence
RKRVGLENPRR

SEQ ID NO: 5428 - protein, 11 aa, Artificial
  IGFBP-2 heparin binding domain-containing peptide sequence
HKRVGLENPRR

SEQ ID NO: 5429 - protein, 11 aa, Artificial
  IGFBP-2 heparin binding domain-containing peptide sequence
KRRVGLENPRR

SEQ ID NO: 5430 - protein, 11 aa, Artificial
  IGFBP-2 heparin binding domain-containing peptide sequence
RRRVGLENPRR

SEQ ID NO: 5431 - protein, 11 aa, Artificial
  IGFBP-2 heparin binding domain-containing peptide sequence
HRRVGLENPRR

SEQ ID NO: 5432 - protein, 11 aa, Artificial
  IGFBP-2 heparin binding domain-containing peptide sequence
KHHLGIENPRR

SEQ ID NO: 5433 - protein, 11 aa, Artificial
  IGFBP-2 heparin binding domain-containing peptide sequence
RHHLGIENPRR

SEQ ID NO: 5434 - protein, 11 aa, Artificial
  IGFBP-2 heparin binding domain-containing peptide sequence
HHHLGIENPRR

SEQ ID NO: 5435 - protein, 11 aa, Artificial
  IGFBP-2 heparin binding domain-containing peptide sequence
KKHLGIENPRR

SEQ ID NO: 5436 - protein, 11 aa, Artificial
  IGFBP-2 heparin binding domain-containing peptide sequence
RKHLGIENPRR

SEQ ID NO: 5437 - protein, 11 aa, Artificial
  IGFBP-2 heparin binding domain-containing peptide sequence
HKHLGIENPRR

SEQ ID NO: 5438 - protein, 11 aa, Artificial
  IGFBP-2 heparin binding domain-containing peptide sequence
KRHLGIENPRR

SEQ ID NO: 5439 - protein, 11 aa, Artificial
  IGFBP-2 heparin binding domain-containing peptide sequence
RRHLGIENPRR

SEQ ID NO: 5440 - protein, 11 aa, Artificial
  IGFBP-2 heparin binding domain-containing peptide sequence
HRHLGIENPRR

SEQ ID NO: 5441 - protein, 11 aa, Artificial
  IGFBP-2 heparin binding domain-containing peptide sequence
KHKLGIENPRR

SEQ ID NO: 5442 - protein, 11 aa, Artificial
  IGFBP-2 heparin binding domain-containing peptide sequence
RHKLGIENPRR

SEQ ID NO: 5443 - protein, 11 aa, Artificial
  IGFBP-2 heparin binding domain-containing peptide sequence
HHKLGIENPRR

SEQ ID NO: 5444 - protein, 11 aa, Artificial
  IGFBP-2 heparin binding domain-containing peptide sequence
KKKLGIENPRR

SEQ ID NO: 5445 - protein, 11 aa, Artificial
  IGFBP-2 heparin binding domain-containing peptide sequence
RKKLGIENPRR

SEQ ID NO: 5446 - protein, 11 aa, Artificial
  IGFBP-2 heparin binding domain-containing peptide sequence
HKKLGIENPRR

SEQ ID NO: 5447 - protein, 11 aa, Artificial
  IGFBP-2 heparin binding domain-containing peptide sequence
KRKLGIENPRR

SEQ ID NO: 5448 - protein, 11 aa, Artificial
  IGFBP-2 heparin binding domain-containing peptide sequence
RRKLGIENPRR

SEQ ID NO: 5449 - protein, 11 aa, Artificial
  IGFBP-2 heparin binding domain-containing peptide sequence
HRKLGIENPRR

SEQ ID NO: 5450 - protein, 11 aa, Artificial
  IGFBP-2 heparin binding domain-containing peptide sequence
KHRLGIENPRR

SEQ ID NO: 5451 - protein, 11 aa, Artificial
  IGFBP-2 heparin binding domain-containing peptide sequence
RHRLGIENPRR

SEQ ID NO: 5452 - protein, 11 aa, Artificial
  IGFBP-2 heparin binding domain-containing peptide sequence
HHRLGIENPRR

SEQ ID NO: 5453 - protein, 11 aa, Artificial
  IGFBP-2 heparin binding domain-containing peptide sequence
KKRLGIENPRR

SEQ ID NO: 5454 - protein, 11 aa, Artificial
  IGFBP-2 heparin binding domain-containing peptide sequence
RKRLGIENPRR

SEQ ID NO: 5455 - protein, 11 aa, Artificial
  IGFBP-2 heparin binding domain-containing peptide sequence
HKRLGIENPRR

SEQ ID NO: 5456 - protein, 11 aa, Artificial
  IGFBP-2 heparin binding domain-containing peptide sequence
KRRLGIENPRR

SEQ ID NO: 5457 - protein, 11 aa, Artificial
  IGFBP-2 heparin binding domain-containing peptide sequence
RRRLGIENPRR

SEQ ID NO: 5458 - protein, 11 aa, Artificial
  IGFBP-2 heparin binding domain-containing peptide sequence
HRRLGIENPRR

SEQ ID NO: 5459 - protein, 11 aa, Artificial
  IGFBP-2 heparin binding domain-containing peptide sequence
KHHIGIENPRR

SEQ ID NO: 5460 - protein, 11 aa, Artificial
  IGFBP-2 heparin binding domain-containing peptide sequence
RHHIGIENPRR

SEQ ID NO: 5461 - protein, 11 aa, Artificial
  IGFBP-2 heparin binding domain-containing peptide sequence
HHHIGIENPRR

SEQ ID NO: 5462 - protein, 11 aa, Artificial
  IGFBP-2 heparin binding domain-containing peptide sequence
KKHIGIENPRR

SEQ ID NO: 5463 - protein, 11 aa, Artificial
  IGFBP-2 heparin binding domain-containing peptide sequence
RKHIGIENPRR

SEQ ID NO: 5464 - protein, 11 aa, Artificial
  IGFBP-2 heparin binding domain-containing peptide sequence
HKHIGIENPRR

SEQ ID NO: 5465 - protein, 11 aa, Artificial
  IGFBP-2 heparin binding domain-containing peptide sequence
KRHIGIENPRR

SEQ ID NO: 5466 - protein, 11 aa, Artificial
  IGFBP-2 heparin binding domain-containing peptide sequence
RRHIGIENPRR

SEQ ID NO: 5467 - protein, 11 aa, Artificial
  IGFBP-2 heparin binding domain-containing peptide sequence
HRHIGIENPRR

SEQ ID NO: 5468 - protein, 11 aa, Artificial
  IGFBP-2 heparin binding domain-containing peptide sequence
KHKIGIENPRR

SEQ ID NO: 5469 - protein, 11 aa, Artificial
  IGFBP-2 heparin binding domain-containing peptide sequence
RHKIGIENPRR

SEQ ID NO: 5470 - protein, 11 aa, Artificial
  IGFBP-2 heparin binding domain-containing peptide sequence
HHKIGIENPRR

SEQ ID NO: 5471 - protein, 11 aa, Artificial
  IGFBP-2 heparin binding domain-containing peptide sequence
KKKIGIENPRR

SEQ ID NO: 5472 - protein, 11 aa, Artificial
  IGFBP-2 heparin binding domain-containing peptide sequence
RKKIGIENPRR

SEQ ID NO: 5473 - protein, 11 aa, Artificial
  IGFBP-2 heparin binding domain-containing peptide sequence
HKKIGIENPRR

SEQ ID NO: 5474 - protein, 11 aa, Artificial
  IGFBP-2 heparin binding domain-containing peptide sequence
KRKIGIENPRR

SEQ ID NO: 5475 - protein, 11 aa, Artificial
  IGFBP-2 heparin binding domain-containing peptide sequence
RRKIGIENPRR

SEQ ID NO: 5476 - protein, 11 aa, Artificial
  IGFBP-2 heparin binding domain-containing peptide sequence
HRKIGIENPRR

SEQ ID NO: 5477 - protein, 11 aa, Artificial
  IGFBP-2 heparin binding domain-containing peptide sequence
KHRIGIENPRR

SEQ ID NO: 5478 - protein, 11 aa, Artificial
  IGFBP-2 heparin binding domain-containing peptide sequence
RHRIGIENPRR

SEQ ID NO: 5479 - protein, 11 aa, Artificial
  IGFBP-2 heparin binding domain-containing peptide sequence
HHRIGIENPRR

SEQ ID NO: 5480 - protein, 11 aa, Artificial
  IGFBP-2 heparin binding domain-containing peptide sequence
KKRIGIENPRR

SEQ ID NO: 5481 - protein, 11 aa, Artificial
  IGFBP-2 heparin binding domain-containing peptide sequence
RKRIGIENPRR

SEQ ID NO: 5482 - protein, 11 aa, Artificial
  IGFBP-2 heparin binding domain-containing peptide sequence
HKRIGIENPRR

SEQ ID NO: 5483 - protein, 11 aa, Artificial
  IGFBP-2 heparin binding domain-containing peptide sequence
KRRIGIENPRR

SEQ ID NO: 5484 - protein, 11 aa, Artificial
  IGFBP-2 heparin binding domain-containing peptide sequence
RRRIGIENPRR

SEQ ID NO: 5485 - protein, 11 aa, Artificial
  IGFBP-2 heparin binding domain-containing peptide sequence
HRRIGIENPRR

SEQ ID NO: 5486 - protein, 11 aa, Artificial
  IGFBP-2 heparin binding domain-containing peptide sequence
KHHVGIENPRR

SEQ ID NO: 5487 - protein, 11 aa, Artificial
  IGFBP-2 heparin binding domain-containing peptide sequence
RHHVGIENPRR

SEQ ID NO: 5488 - protein, 11 aa, Artificial
  IGFBP-2 heparin binding domain-containing peptide sequence
HHHVGIENPRR

SEQ ID NO: 5489 - protein, 11 aa, Artificial
  IGFBP-2 heparin binding domain-containing peptide sequence
KKHVGIENPRR

SEQ ID NO: 5490 - protein, 11 aa, Artificial
  IGFBP-2 heparin binding domain-containing peptide sequence
RKHVGIENPRR

SEQ ID NO: 5491 - protein, 11 aa, Artificial
  IGFBP-2 heparin binding domain-containing peptide sequence
HKHVGIENPRR

SEQ ID NO: 5492 - protein, 11 aa, Artificial
  IGFBP-2 heparin binding domain-containing peptide sequence
KRHVGIENPRR

SEQ ID NO: 5493 - protein, 11 aa, Artificial
  IGFBP-2 heparin binding domain-containing peptide sequence
RRHVGIENPRR

SEQ ID NO: 5494 - protein, 11 aa, Artificial
  IGFBP-2 heparin binding domain-containing peptide sequence
HRHVGIENPRR

SEQ ID NO: 5495 - protein, 11 aa, Artificial
  IGFBP-2 heparin binding domain-containing peptide sequence
KHKVGIENPRR

SEQ ID NO: 5496 - protein, 11 aa, Artificial
  IGFBP-2 heparin binding domain-containing peptide sequence
RHKVGIENPRR

SEQ ID NO: 5497 - protein, 11 aa, Artificial
  IGFBP-2 heparin binding domain-containing peptide sequence
HHKVGIENPRR

SEQ ID NO: 5498 - protein, 11 aa, Artificial
  IGFBP-2 heparin binding domain-containing peptide sequence
KKKVGIENPRR

SEQ ID NO: 5499 - protein, 11 aa, Artificial
  IGFBP-2 heparin binding domain-containing peptide sequence
RKKVGIENPRR

SEQ ID NO: 5500 - protein, 11 aa, Artificial
  IGFBP-2 heparin binding domain-containing peptide sequence
HKKVGIENPRR

SEQ ID NO: 5501 - protein, 11 aa, Artificial
  IGFBP-2 heparin binding domain-containing peptide sequence
KRKVGIENPRR

SEQ ID NO: 5502 - protein, 11 aa, Artificial
  IGFBP-2 heparin binding domain-containing peptide sequence
RRKVGIENPRR

SEQ ID NO: 5503 - protein, 11 aa, Artificial
  IGFBP-2 heparin binding domain-containing peptide sequence
HRKVGIENPRR

SEQ ID NO: 5504 - protein, 11 aa, Artificial
  IGFBP-2 heparin binding domain-containing peptide sequence
KHRVGIENPRR

SEQ ID NO: 5505 - protein, 11 aa, Artificial
  IGFBP-2 heparin binding domain-containing peptide sequence
RHRVGIENPRR

SEQ ID NO: 5506 - protein, 11 aa, Artificial
  IGFBP-2 heparin binding domain-containing peptide sequence
HHRVGIENPRR

SEQ ID NO: 5507 - protein, 11 aa, Artificial
  IGFBP-2 heparin binding domain-containing peptide sequence
KKRVGIENPRR

SEQ ID NO: 5508 - protein, 11 aa, Artificial
  IGFBP-2 heparin binding domain-containing peptide sequence
RKRVGIENPRR

SEQ ID NO: 5509 - protein, 11 aa, Artificial
  IGFBP-2 heparin binding domain-containing peptide sequence
HKRVGIENPRR

SEQ ID NO: 5510 - protein, 11 aa, Artificial
  IGFBP-2 heparin binding domain-containing peptide sequence
KRRVGIENPRR

SEQ ID NO: 5511 - protein, 11 aa, Artificial
  IGFBP-2 heparin binding domain-containing peptide sequence
RRRVGIENPRR

SEQ ID NO: 5512 - protein, 11 aa, Artificial
  IGFBP-2 heparin binding domain-containing peptide sequence
HRRVGIENPRR

SEQ ID NO: 5513 - protein, 11 aa, Artificial
  IGFBP-2 heparin binding domain-containing peptide sequence
KHHLGVENPRR

SEQ ID NO: 5514 - protein, 11 aa, Artificial
  IGFBP-2 heparin binding domain-containing peptide sequence
RHHLGVENPRR

SEQ ID NO: 5515 - protein, 11 aa, Artificial
  IGFBP-2 heparin binding domain-containing peptide sequence
HHHLGVENPRR

SEQ ID NO: 5516 - protein, 11 aa, Artificial
  IGFBP-2 heparin binding domain-containing peptide sequence
KKHLGVENPRR

SEQ ID NO: 5517 - protein, 11 aa, Artificial
  IGFBP-2 heparin binding domain-containing peptide sequence
RKHLGVENPRR

SEQ ID NO: 5518 - protein, 11 aa, Artificial
  IGFBP-2 heparin binding domain-containing peptide sequence
HKHLGVENPRR

SEQ ID NO: 5519 - protein, 11 aa, Artificial
  IGFBP-2 heparin binding domain-containing peptide sequence
KRHLGVENPRR

SEQ ID NO: 5520 - protein, 11 aa, Artificial
  IGFBP-2 heparin binding domain-containing peptide sequence
RRHLGVENPRR

SEQ ID NO: 5521 - protein, 11 aa, Artificial
  IGFBP-2 heparin binding domain-containing peptide sequence
HRHLGVENPRR

SEQ ID NO: 5522 - protein, 11 aa, Artificial
  IGFBP-2 heparin binding domain-containing peptide sequence
KHKLGVENPRR

SEQ ID NO: 5523 - protein, 11 aa, Artificial
  IGFBP-2 heparin binding domain-containing peptide sequence
RHKLGVENPRR

SEQ ID NO: 5524 - protein, 11 aa, Artificial
  IGFBP-2 heparin binding domain-containing peptide sequence
HHKLGVENPRR

SEQ ID NO: 5525 - protein, 11 aa, Artificial
  IGFBP-2 heparin binding domain-containing peptide sequence
KKKLGVENPRR

SEQ ID NO: 5526 - protein, 11 aa, Artificial
  IGFBP-2 heparin binding domain-containing peptide sequence
RKKLGVENPRR

SEQ ID NO: 5527 - protein, 11 aa, Artificial
  IGFBP-2 heparin binding domain-containing peptide sequence
HKKLGVENPRR

SEQ ID NO: 5528 - protein, 11 aa, Artificial
  IGFBP-2 heparin binding domain-containing peptide sequence
KRKLGVENPRR

SEQ ID NO: 5529 - protein, 11 aa, Artificial
  IGFBP-2 heparin binding domain-containing peptide sequence
RRKLGVENPRR

SEQ ID NO: 5530 - protein, 11 aa, Artificial
  IGFBP-2 heparin binding domain-containing peptide sequence
HRKLGVENPRR

SEQ ID NO: 5531 - protein, 11 aa, Artificial
  IGFBP-2 heparin binding domain-containing peptide sequence
KHRLGVENPRR

SEQ ID NO: 5532 - protein, 11 aa, Artificial
  IGFBP-2 heparin binding domain-containing peptide sequence
RHRLGVENPRR

SEQ ID NO: 5533 - protein, 11 aa, Artificial
  IGFBP-2 heparin binding domain-containing peptide sequence
HHRLGVENPRR

SEQ ID NO: 5534 - protein, 11 aa, Artificial
  IGFBP-2 heparin binding domain-containing peptide sequence
KKRLGVENPRR

SEQ ID NO: 5535 - protein, 11 aa, Artificial
  IGFBP-2 heparin binding domain-containing peptide sequence
RKRLGVENPRR

SEQ ID NO: 5536 - protein, 11 aa, Artificial
  IGFBP-2 heparin binding domain-containing peptide sequence
HKRLGVENPRR

SEQ ID NO: 5537 - protein, 11 aa, Artificial
  IGFBP-2 heparin binding domain-containing peptide sequence
KRRLGVENPRR

SEQ ID NO: 5538 - protein, 11 aa, Artificial
  IGFBP-2 heparin binding domain-containing peptide sequence
RRRLGVENPRR

SEQ ID NO: 5539 - protein, 11 aa, Artificial
  IGFBP-2 heparin binding domain-containing peptide sequence
HRRLGVENPRR

SEQ ID NO: 5540 - protein, 11 aa, Artificial
  IGFBP-2 heparin binding domain-containing peptide sequence
KHHIGVENPRR

SEQ ID NO: 5541 - protein, 11 aa, Artificial
  IGFBP-2 heparin binding domain-containing peptide sequence
RHHIGVEEPRR

SEQ ID NO: 5542 - protein, 11 aa, Artificial
  IGFBP-2 heparin binding domain-containing peptide sequence
HHHIGVENPRR

SEQ ID NO: 5543 - protein, 11 aa, Artificial
  IGFBP-2 heparin binding domain-containing peptide sequence
KKHIGVENPRR

SEQ ID NO: 5544 - protein, 11 aa, Artificial
  IGFBP-2 heparin binding domain-containing peptide sequence
RKHIGVENPRR

SEQ ID NO: 5545 - protein, 11 aa, Artificial
  IGFBP-2 heparin binding domain-containing peptide sequence
HKHIGVENPRR

SEQ ID NO: 5546 - protein, 11 aa, Artificial
  IGFBP-2 heparin binding domain-containing peptide sequence
KRHIGVENPRR

SEQ ID NO: 5547 - protein, 11 aa, Artificial
  IGFBP-2 heparin binding domain-containing peptide sequence
RRHIGVENPRR

SEQ ID NO: 5548 - protein, 11 aa, Artificial
  IGFBP-2 heparin binding domain-containing peptide sequence
HRHIGVENPRR

SEQ ID NO: 5549 - protein, 11 aa, Artificial
  IGFBP-2 heparin binding domain-containing peptide sequence
KHKIGVENPRR

SEQ ID NO: 5550 - protein, 11 aa, Artificial
  IGFBP-2 heparin binding domain-containing peptide sequence
RHKIGVENPRR

SEQ ID NO: 5551 - protein, 11 aa, Artificial
  IGFBP-2 heparin binding domain-containing peptide sequence
HHKIGVENPRR

SEQ ID NO: 5552 - protein, 11 aa, Artificial
  IGFBP-2 heparin binding domain-containing peptide sequence
KKKIGVENPRR

SEQ ID NO: 5553 - protein, 11 aa, Artificial
  IGFBP-2 heparin binding domain-containing peptide sequence
RKKIGVENPRR

SEQ ID NO: 5554 - protein, 11 aa, Artificial
  IGFBP-2 heparin binding domain-containing peptide sequence
HKKIGVENPRR

SEQ ID NO: 5555 - protein, 11 aa, Artificial
  IGFBP-2 heparin binding domain-containing peptide sequence
KRKIGVENPRR

SEQ ID NO: 5556 - protein, 11 aa, Artificial
  IGFBP-2 heparin binding domain-containing peptide sequence
RRKIGVENPRR

SEQ ID NO: 5557 - protein, 11 aa, Artificial
  IGFBP-2 heparin binding domain-containing peptide sequence
HRKIGVENPRR

SEQ ID NO: 5558 - protein, 11 aa, Artificial
  IGFBP-2 heparin binding domain-containing peptide sequence
KHRIGVENPRR

SEQ ID NO: 5559 - protein, 11 aa, Artificial
  IGFBP-2 heparin binding domain-containing peptide sequence
RHRIGVENPRR

SEQ ID NO: 5560 - protein, 11 aa, Artificial
  IGFBP-2 heparin binding domain-containing peptide sequence
HHRIGVENPRR

SEQ ID NO: 5561 - protein, 11 aa, Artificial
  IGFBP-2 heparin binding domain-containing peptide sequence
KKRIGVENPRR

SEQ ID NO: 5562 - protein, 11 aa, Artificial
  IGFBP-2 heparin binding domain-containing peptide sequence
RKRIGVENPRR

SEQ ID NO: 5563 - protein, 11 aa, Artificial
  IGFBP-2 heparin binding domain-containing peptide sequence
HKRIGVENPRR

SEQ ID NO: 5564 - protein, 11 aa, Artificial
  IGFBP-2 heparin binding domain-containing peptide sequence
KRRIGVENPRR

SEQ ID NO: 5565 - protein, 11 aa, Artificial
  IGFBP-2 heparin binding domain-containing peptide sequence
RRRIGVENPRR

SEQ ID NO: 5566 - protein, 11 aa, Artificial
  IGFBP-2 heparin binding domain-containing peptide sequence
HRRIGVENPRR

SEQ ID NO: 5567 - protein, 11 aa, Artificial
  IGFBP-2 heparin binding domain-containing peptide sequence
KHHVGVENPRR

SEQ ID NO: 5568 - protein, 11 aa, Artificial
  IGFBP-2 heparin binding domain-containing peptide sequence
RHHVGVENPRR

SEQ ID NO: 5569 - protein, 11 aa, Artificial
  IGFBP-2 heparin binding domain-containing peptide sequence
HHHVGVENPRR

SEQ ID NO: 5570 - protein, 11 aa, Artificial
  IGFBP-2 heparin binding domain-containing peptide sequence
KKHVGVENPRR

SEQ ID NO: 5571 - protein, 11 aa, Artificial
  IGFBP-2 heparin binding domain-containing peptide sequence
RKHVGVENPRR

SEQ ID NO: 5572 - protein, 11 aa, Artificial
  IGFBP-2 heparin binding domain-containing peptide sequence
HKHVGVENPRR

SEQ ID NO: 5573 - protein, 11 aa, Artificial
  IGFBP-2 heparin binding domain-containing peptide sequence
KRHVGVENPRR

SEQ ID NO: 5574 - protein, 11 aa, Artificial
  IGFBP-2 heparin binding domain-containing peptide sequence
RRHVGVENPRR

SEQ ID NO: 5575 - protein, 11 aa, Artificial
  IGFBP-2 heparin binding domain-containing peptide sequence
HRHVGVENPRR

SEQ ID NO: 5576 - protein, 11 aa, Artificial
  IGFBP-2 heparin binding domain-containing peptide sequence
KHKVGVENPRR

SEQ ID NO: 5577 - protein, 11 aa, Artificial
  IGFBP-2 heparin binding domain-containing peptide sequence
RHKVGVENPRR

SEQ ID NO: 5578 - protein, 11 aa, Artificial
  IGFBP-2 heparin binding domain-containing peptide sequence
HHKVGVENPRR

SEQ ID NO: 5579 - protein, 11 aa, Artificial
  IGFBP-2 heparin binding domain-containing peptide sequence
KKKVGVENPRR

SEQ ID NO: 5580 - protein, 11 aa, Artificial
  IGFBP-2 heparin binding domain-containing peptide sequence
RKKVGVENPRR

SEQ ID NO: 5581 - protein, 11 aa, Artificial
  IGFBP-2 heparin binding domain-containing peptide sequence
HKKVGVENPRR

SEQ ID NO: 5582 - protein, 11 aa, Artificial
  IGFBP-2 heparin binding domain-containing peptide sequence
KRKVGVENPRR

SEQ ID NO: 5583 - protein, 11 aa, Artificial
  IGFBP-2 heparin binding domain-containing peptide sequence
RRKVGVEEPRR

SEQ ID NO: 5584 - protein, 11 aa, Artificial
  IGFBP-2 heparin binding domain-containing peptide sequence
HRKVGVENPRR

SEQ ID NO: 5585 - protein, 11 aa, Artificial
  IGFBP-2 heparin binding domain-containing peptide sequence
KHRVGVENPRR

SEQ ID NO: 5586 - protein, 11 aa, Artificial
  IGFBP-2 heparin binding domain-containing peptide sequence
RHRVGVENPRR

SEQ ID NO: 5587 - protein, 11 aa, Artificial
  IGFBP-2 heparin binding domain-containing peptide sequence
HHRVGVENPRR

SEQ ID NO: 5588 - protein, 11 aa, Artificial
  IGFBP-2 heparin binding domain-containing peptide sequence
KKRVGVENPRR

SEQ ID NO: 5589 - protein, 11 aa, Artificial
  IGFBP-2 heparin binding domain-containing peptide sequence
RKRVGVENPRR

SEQ ID NO: 5590 - protein, 11 aa, Artificial
  IGFBP-2 heparin binding domain-containing peptide sequence
HKRVGVENPRR

SEQ ID NO: 5591 - protein, 11 aa, Artificial
  IGFBP-2 heparin binding domain-containing peptide sequence
KRRVGVENPRR

SEQ ID NO: 5592 - protein, 11 aa, Artificial
  IGFBP-2 heparin binding domain-containing peptide sequence
RRRVGVENPRR

SEQ ID NO: 5593 - protein, 11 aa, Artificial
  IGFBP-2 heparin binding domain-containing peptide sequence
HRRVGVENPRR

SEQ ID NO: 5594 - protein, 11 aa, Artificial
  IGFBP-2 heparin binding domain-containing peptide sequence
KHHLGLNNPRR

SEQ ID NO: 5595 - protein, 11 aa, Artificial
  IGFBP-2 heparin binding domain-containing peptide sequence
RHHLGLNNPRR

SEQ ID NO: 5596 - protein, 11 aa, Artificial
  IGFBP-2 heparin binding domain-containing peptide sequence
HHHLGLNNPRR

SEQ ID NO: 5597 - protein, 11 aa, Artificial
  IGFBP-2 heparin binding domain-containing peptide sequence
KKHLGLNNPRR

SEQ ID NO: 5598 - protein, 11 aa, Artificial
  IGFBP-2 heparin binding domain-containing peptide sequence
RKHLGLNNPRR

SEQ ID NO: 5599 - protein, 11 aa, Artificial
  IGFBP-2 heparin binding domain-containing peptide sequence
HKHLGLNNPRR

SEQ ID NO: 5600 - protein, 11 aa, Artificial
  IGFBP-2 heparin binding domain-containing peptide sequence
KRHLGLNNPRR

SEQ ID NO: 5601 - protein, 11 aa, Artificial
  IGFBP-2 heparin binding domain-containing peptide sequence
RRHLGLNNPRR

SEQ ID NO: 5602 - protein, 11 aa, Artificial
  IGFBP-2 heparin binding domain-containing peptide sequence
HRHLGLNNPRR

SEQ ID NO: 5603 - protein, 11 aa, Artificial
  IGFBP-2 heparin binding domain-containing peptide sequence
KHKLGLNNPRR

SEQ ID NO: 5604 - protein, 11 aa, Artificial
  IGFBP-2 heparin binding domain-containing peptide sequence
RHKLGLNNPRR

SEQ ID NO: 5605 - protein, 11 aa, Artificial
  IGFBP-2 heparin binding domain-containing peptide sequence
HHKLGLNNPRR

SEQ ID NO: 5606 - protein, 11 aa, Artificial
  IGFBP-2 heparin binding domain-containing peptide sequence
KKKLGLNNPRR

SEQ ID NO: 5607 - protein, 11 aa, Artificial
  IGFBP-2 heparin binding domain-containing peptide sequence
RKKLGLNNPRR

SEQ ID NO: 5608 - protein, 11 aa, Artificial
  IGFBP-2 heparin binding domain-containing peptide sequence
HKKLGLNNPRR

SEQ ID NO: 5609 - protein, 11 aa, Artificial
  IGFBP-2 heparin binding domain-containing peptide sequence
KRKLGLNNPRR

SEQ ID NO: 5610 - protein, 11 aa, Artificial
  IGFBP-2 heparin binding domain-containing peptide sequence
RRKLGLNNPRR

SEQ ID NO: 5611 - protein, 11 aa, Artificial
  IGFBP-2 heparin binding domain-containing peptide sequence
HRKLGLNNPRR

SEQ ID NO: 5612 - protein, 11 aa, Artificial
  IGFBP-2 heparin binding domain-containing peptide sequence
KHRLGLNNPRR

SEQ ID NO: 5613 - protein, 11 aa, Artificial
  IGFBP-2 heparin binding domain-containing peptide sequence
RHRLGLNNPRR

SEQ ID NO: 5614 - protein, 11 aa, Artificial
  IGFBP-2 heparin binding domain-containing peptide sequence
HHRLGLNNPRR

SEQ ID NO: 5615 - protein, 11 aa, Artificial
  IGFBP-2 heparin binding domain-containing peptide sequence
KKRLGLNNPRR

SEQ ID NO: 5616 - protein, 11 aa, Artificial
  IGFBP-2 heparin binding domain-containing peptide sequence
RKRLGLNNPRR

SEQ ID NO: 5617 - protein, 11 aa, Artificial
  IGFBP-2 heparin binding domain-containing peptide sequence
HKRLGLNNPRR

SEQ ID NO: 5618 - protein, 11 aa, Artificial
  IGFBP-2 heparin binding domain-containing peptide sequence
KRRLGLNNPRR

SEQ ID NO: 5619 - protein, 11 aa, Artificial
  IGFBP-2 heparin binding domain-containing peptide sequence
RRRLGLNNPRR

SEQ ID NO: 5620 - protein, 11 aa, Artificial
  IGFBP-2 heparin binding domain-containing peptide sequence
HRRLGLNNPRR

SEQ ID NO: 5621 - protein, 11 aa, Artificial
  IGFBP-2 heparin binding domain-containing peptide sequence
KHHIGLNNPRR

SEQ ID NO: 5622 - protein, 11 aa, Artificial
  IGFBP-2 heparin binding domain-containing peptide sequence
RHHIGLNNPRR

SEQ ID NO: 5623 - protein, 11 aa, Artificial
  IGFBP-2 heparin binding domain-containing peptide sequence
HHHIGLNNPRR

SEQ ID NO: 5624 - protein, 11 aa, Artificial
  IGFBP-2 heparin binding domain-containing peptide sequence
KKHIGLNNPRR

SEQ ID NO: 5625 - protein, 11 aa, Artificial
  IGFBP-2 heparin binding domain-containing peptide sequence
RKHIGLNNPRR

SEQ ID NO: 5626 - protein, 11 aa, Artificial
  IGFBP-2 heparin binding domain-containing peptide sequence
HKHIGLNNPRR

SEQ ID NO: 5627 - protein, 11 aa, Artificial
  IGFBP-2 heparin binding domain-containing peptide sequence
KRHIGLNNPRR

SEQ ID NO: 5628 - protein, 11 aa, Artificial
  IGFBP-2 heparin binding domain-containing peptide sequence
RRHIGLNNPRR

SEQ ID NO: 5629 - protein, 11 aa, Artificial
  IGFBP-2 heparin binding domain-containing peptide sequence
HRHIGLNNPRR

SEQ ID NO: 5630 - protein, 11 aa, Artificial
  IGFBP-2 heparin binding domain-containing peptide sequence
KHKIGLNNPRR

SEQ ID NO: 5631 - protein, 11 aa, Artificial
  IGFBP-2 heparin binding domain-containing peptide sequence
RHKIGLNNPRR

SEQ ID NO: 5632 - protein, 11 aa, Artificial
  IGFBP-2 heparin binding domain-containing peptide sequence
HHKIGLNNPRR

SEQ ID NO: 5633 - protein, 11 aa, Artificial
  IGFBP-2 heparin binding domain-containing peptide sequence
KKKIGLNNPRR

SEQ ID NO: 5634 - protein, 11 aa, Artificial
  IGFBP-2 heparin binding domain-containing peptide sequence
RKKIGLNNPRR

SEQ ID NO: 5635 - protein, 11 aa, Artificial
  IGFBP-2 heparin binding domain-containing peptide sequence
HKKIGLNNPRR

SEQ ID NO: 5636 - protein, 11 aa, Artificial
  IGFBP-2 heparin binding domain-containing peptide sequence
KRKIGLNNPRR

SEQ ID NO: 5637 - protein, 11 aa, Artificial
  IGFBP-2 heparin binding domain-containing peptide sequence
RRKIGLNNPRR

SEQ ID NO: 5638 - protein, 11 aa, Artificial
  IGFBP-2 heparin binding domain-containing peptide sequence
HRKIGLNNPRR

SEQ ID NO: 5639 - protein, 11 aa, Artificial
  IGFBP-2 heparin binding domain-containing peptide sequence
KHRIGLNNPRR

SEQ ID NO: 5640 - protein, 11 aa, Artificial
  IGFBP-2 heparin binding domain-containing peptide sequence
RHRIGLNNPRR

SEQ ID NO: 5641 - protein, 11 aa, Artificial
  IGFBP-2 heparin binding domain-containing peptide sequence
HHRIGLNNPRR

SEQ ID NO: 5642 - protein, 11 aa, Artificial
  IGFBP-2 heparin binding domain-containing peptide sequence
KKRIGLNNPRR

SEQ ID NO: 5643 - protein, 11 aa, Artificial
  IGFBP-2 heparin binding domain-containing peptide sequence
RKRIGLNNPRR

SEQ ID NO: 5644 - protein, 11 aa, Artificial
  IGFBP-2 heparin binding domain-containing peptide sequence
HKRIGLNNPRR

SEQ ID NO: 5645 - protein, 11 aa, Artificial
  IGFBP-2 heparin binding domain-containing peptide sequence
KRRIGLNNPRR

SEQ ID NO: 5646 - protein, 11 aa, Artificial
  IGFBP-2 heparin binding domain-containing peptide sequence
RRRIGLNNPRR

SEQ ID NO: 5647 - protein, 11 aa, Artificial
  IGFBP-2 heparin binding domain-containing peptide sequence
HRRIGLNNPRR

SEQ ID NO: 5648 - protein, 11 aa, Artificial
  IGFBP-2 heparin binding domain-containing peptide sequence
KHHVGLNNPRR

SEQ ID NO: 5649 - protein, 11 aa, Artificial
  IGFBP-2 heparin binding domain-containing peptide sequence
RHHVGLNNPRR

SEQ ID NO: 5650 - protein, 11 aa, Artificial
  IGFBP-2 heparin binding domain-containing peptide sequence
HHHVGLNNPRR

SEQ ID NO: 5651 - protein, 11 aa, Artificial
  IGFBP-2 heparin binding domain-containing peptide sequence
KKHVGLNNPRR

SEQ ID NO: 5652 - protein, 11 aa, Artificial
  IGFBP-2 heparin binding domain-containing peptide sequence
RKHVGLNNPRR

SEQ ID NO: 5653 - protein, 11 aa, Artificial
  IGFBP-2 heparin binding domain-containing peptide sequence
HKHVGLNNPRR

SEQ ID NO: 5654 - protein, 11 aa, Artificial
  IGFBP-2 heparin binding domain-containing peptide sequence
KRHVGLNNPRR

SEQ ID NO: 5655 - protein, 11 aa, Artificial
  IGFBP-2 heparin binding domain-containing peptide sequence
RRHVGLNNPRR

SEQ ID NO: 5656 - protein, 11 aa, Artificial
  IGFBP-2 heparin binding domain-containing peptide sequence
HRHVGLNNPRR

SEQ ID NO: 5657 - protein, 11 aa, Artificial
  IGFBP-2 heparin binding domain-containing peptide sequence
KHKVGLNNPRR

SEQ ID NO: 5658 - protein, 11 aa, Artificial
  IGFBP-2 heparin binding domain-containing peptide sequence
RHKVGLNNPRR

SEQ ID NO: 5659 - protein, 11 aa, Artificial
  IGFBP-2 heparin binding domain-containing peptide sequence
HHKVGLNNPRR

SEQ ID NO: 5660 - protein, 11 aa, Artificial
  IGFBP-2 heparin binding domain-containing peptide sequence
KKKVGLNNPRR

SEQ ID NO: 5661 - protein, 11 aa, Artificial
  IGFBP-2 heparin binding domain-containing peptide sequence
RKKVGLNNPRR

SEQ ID NO: 5662 - protein, 11 aa, Artificial
  IGFBP-2 heparin binding domain-containing peptide sequence
HKKVGLNNPRR

SEQ ID NO: 5663 - protein, 11 aa, Artificial
  IGFBP-2 heparin binding domain-containing peptide sequence
KRKVGLNNPRR

SEQ ID NO: 5664 - protein, 11 aa, Artificial
  IGFBP-2 heparin binding domain-containing peptide sequence
RRKVGLNNPRR

SEQ ID NO: 5665 - protein, 11 aa, Artificial
  IGFBP-2 heparin binding domain-containing peptide sequence
HRKVGLNNPRR

SEQ ID NO: 5666 - protein, 11 aa, Artificial
  IGFBP-2 heparin binding domain-containing peptide sequence
KHRVGLNNPRR

SEQ ID NO: 5667 - protein, 11 aa, Artificial
  IGFBP-2 heparin binding domain-containing peptide sequence
RHRVGLNNPRR

SEQ ID NO: 5668 - protein, 11 aa, Artificial
  IGFBP-2 heparin binding domain-containing peptide sequence
HHRVGLNNPRR

SEQ ID NO: 5669 - protein, 11 aa, Artificial
  IGFBP-2 heparin binding domain-containing peptide sequence
KKRVGLNNPRR

SEQ ID NO: 5670 - protein, 11 aa, Artificial
  IGFBP-2 heparin binding domain-containing peptide sequence
RKRVGLNNPRR

SEQ ID NO: 5671 - protein, 11 aa, Artificial
  IGFBP-2 heparin binding domain-containing peptide sequence
HKRVGLNNPRR

SEQ ID NO: 5672 - protein, 11 aa, Artificial
  IGFBP-2 heparin binding domain-containing peptide sequence
KRRVGLNNPRR

SEQ ID NO: 5673 - protein, 11 aa, Artificial
  IGFBP-2 heparin binding domain-containing peptide sequence
RRRVGLNNPRR

SEQ ID NO: 5674 - protein, 11 aa, Artificial
  IGFBP-2 heparin binding domain-containing peptide sequence
HRRVGLNNPRR

SEQ ID NO: 5675 - protein, 11 aa, Artificial
  IGFBP-2 heparin binding domain-containing peptide sequence
KHHLGINNPRR

SEQ ID NO: 5676 - protein, 11 aa, Artificial
  IGFBP-2 heparin binding domain-containing peptide sequence
RHHLGINNPRR

SEQ ID NO: 5677 - protein, 11 aa, Artificial
  IGFBP-2 heparin binding domain-containing peptide sequence
HHHLGINNPRR

SEQ ID NO: 5678 - protein, 11 aa, Artificial
  IGFBP-2 heparin binding domain-containing peptide sequence
KKHLGINNPRR

SEQ ID NO: 5679 - protein, 11 aa, Artificial
  IGFBP-2 heparin binding domain-containing peptide sequence
RKHLGINNPRR

SEQ ID NO: 5680 - protein, 11 aa, Artificial
  IGFBP-2 heparin binding domain-containing peptide sequence
HKHLGINNPRR

SEQ ID NO: 5681 - protein, 11 aa, Artificial
  IGFBP-2 heparin binding domain-containing peptide sequence
KRHLGINNPRR

SEQ ID NO: 5682 - protein, 11 aa, Artificial
  IGFBP-2 heparin binding domain-containing peptide sequence
RRHLGINNPRR

SEQ ID NO: 5683 - protein, 11 aa, Artificial
  IGFBP-2 heparin binding domain-containing peptide sequence
HRHLGINNPRR

SEQ ID NO: 5684 - protein, 11 aa, Artificial
  IGFBP-2 heparin binding domain-containing peptide sequence
KHKLGINNPRR

SEQ ID NO: 5685 - protein, 11 aa, Artificial
  IGFBP-2 heparin binding domain-containing peptide sequence
RHKLGINNPRR

SEQ ID NO: 5686 - protein, 11 aa, Artificial
  IGFBP-2 heparin binding domain-containing peptide sequence
HHKLGINNPRR

SEQ ID NO: 5687 - protein, 11 aa, Artificial
  IGFBP-2 heparin binding domain-containing peptide sequence
KKKLGINNPRR

SEQ ID NO: 5688 - protein, 11 aa, Artificial
  IGFBP-2 heparin binding domain-containing peptide sequence
RKKLGINNPRR

SEQ ID NO: 5689 - protein, 11 aa, Artificial
  IGFBP-2 heparin binding domain-containing peptide sequence
HKKLGINNPRR

SEQ ID NO: 5690 - protein, 11 aa, Artificial
  IGFBP-2 heparin binding domain-containing peptide sequence
KRKLGINNPRR

SEQ ID NO: 5691 - protein, 11 aa, Artificial
  IGFBP-2 heparin binding domain-containing peptide sequence
RRKLGINNPRR

SEQ ID NO: 5692 - protein, 11 aa, Artificial
  IGFBP-2 heparin binding domain-containing peptide sequence
HRKLGINNPRR

SEQ ID NO: 5693 - protein, 11 aa, Artificial
  IGFBP-2 heparin binding domain-containing peptide sequence
KHRLGINNPRR

SEQ ID NO: 5694 - protein, 11 aa, Artificial
  IGFBP-2 heparin binding domain-containing peptide sequence
RHRLGINNPRR

SEQ ID NO: 5695 - protein, 11 aa, Artificial
  IGFBP-2 heparin binding domain-containing peptide sequence
HHRLGINNPRR

SEQ ID NO: 5696 - protein, 11 aa, Artificial
  IGFBP-2 heparin binding domain-containing peptide sequence
KKRLGINNPRR

SEQ ID NO: 5697 - protein, 11 aa, Artificial
  IGFBP-2 heparin binding domain-containing peptide sequence
RKRLGINNPRR

SEQ ID NO: 5698 - protein, 11 aa, Artificial
  IGFBP-2 heparin binding domain-containing peptide sequence
HKRLGINNPRR

SEQ ID NO: 5699 - protein, 11 aa, Artificial
  IGFBP-2 heparin binding domain-containing peptide sequence
KRRLGINNPRR

SEQ ID NO: 5700 - protein, 11 aa, Artificial
  IGFBP-2 heparin binding domain-containing peptide sequence
RRRLGINNPRR

SEQ ID NO: 5701 - protein, 11 aa, Artificial
  IGFBP-2 heparin binding domain-containing peptide sequence
HRRLGINNPRR

SEQ ID NO: 5702 - protein, 11 aa, Artificial
  IGFBP-2 heparin binding domain-containing peptide sequence
KHHIGIENPRR

SEQ ID NO: 5703 - protein, 11 aa, Artificial
  IGFBP-2 heparin binding domain-containing peptide sequence
RHHIGINNPRR

SEQ ID NO: 5704 - protein, 11 aa, Artificial
  IGFBP-2 heparin binding domain-containing peptide sequence
HHHIGINNPRR

SEQ ID NO: 5705 - protein, 11 aa, Artificial
  IGFBP-2 heparin binding domain-containing peptide sequence
KKHIGINNPRR

SEQ ID NO: 5706 - protein, 11 aa, Artificial
  IGFBP-2 heparin binding domain-containing peptide sequence
RKHIGINNPRR

SEQ ID NO: 5707 - protein, 11 aa, Artificial
  IGFBP-2 heparin binding domain-containing peptide sequence
HKHIGINNPRR

SEQ ID NO: 5708 - protein, 11 aa, Artificial
  IGFBP-2 heparin binding domain-containing peptide sequence
KRHIGINNPRR

SEQ ID NO: 5709 - protein, 11 aa, Artificial
  IGFBP-2 heparin binding domain-containing peptide sequence
RRHIGINNPRR

SEQ ID NO: 5710 - protein, 11 aa, Artificial
  IGFBP-2 heparin binding domain-containing peptide sequence
HRHIGINNPRR

SEQ ID NO: 5711 - protein, 11 aa, Artificial
  IGFBP-2 heparin binding domain-containing peptide sequence
KHKIGINNPRR

SEQ ID NO: 5712 - protein, 11 aa, Artificial
  IGFBP-2 heparin binding domain-containing peptide sequence
RHKIGINNPRR

SEQ ID NO: 5713 - protein, 11 aa, Artificial
  IGFBP-2 heparin binding domain-containing peptide sequence
HHKIGINNPRR

SEQ ID NO: 5714 - protein, 11 aa, Artificial
  IGFBP-2 heparin binding domain-containing peptide sequence
KKKIGINNPRR

SEQ ID NO: 5715 - protein, 11 aa, Artificial
  IGFBP-2 heparin binding domain-containing peptide sequence
RKKIGINNPRR

SEQ ID NO: 5716 - protein, 11 aa, Artificial
  IGFBP-2 heparin binding domain-containing peptide sequence
HKKIGINNPRR

SEQ ID NO: 5717 - protein, 11 aa, Artificial
  IGFBP-2 heparin binding domain-containing peptide sequence
KRKIGINNPRR

SEQ ID NO: 5718 - protein, 11 aa, Artificial
  IGFBP-2 heparin binding domain-containing peptide sequence
RRKIGINNPRR

SEQ ID NO: 5719 - protein, 11 aa, Artificial
  IGFBP-2 heparin binding domain-containing peptide sequence
HRKIGINNPRR

SEQ ID NO: 5720 - protein, 11 aa, Artificial
  IGFBP-2 heparin binding domain-containing peptide sequence
KHRIGINNPRR

SEQ ID NO: 5721 - protein, 11 aa, Artificial
  IGFBP-2 heparin binding domain-containing peptide sequence
RHRIGINNPRR

SEQ ID NO: 5722 - protein, 11 aa, Artificial
  IGFBP-2 heparin binding domain-containing peptide sequence
HHRIGINNPRR

SEQ ID NO: 5723 - protein, 11 aa, Artificial
  IGFBP-2 heparin binding domain-containing peptide sequence
KKRIGINNPRR

SEQ ID NO: 5724 - protein, 11 aa, Artificial
  IGFBP-2 heparin binding domain-containing peptide sequence
RKRIGINNPRR

SEQ ID NO: 5725 - protein, 11 aa, Artificial
  IGFBP-2 heparin binding domain-containing peptide sequence
HKRIGINNPRR

SEQ ID NO: 5726 - protein, 11 aa, Artificial
  IGFBP-2 heparin binding domain-containing peptide sequence
KRRIGINNPRR

SEQ ID NO: 5727 - protein, 11 aa, Artificial
  IGFBP-2 heparin binding domain-containing peptide sequence
RRRIGINNPRR

SEQ ID NO: 5728 - protein, 11 aa, Artificial
  IGFBP-2 heparin binding domain-containing peptide sequence
HRRIGINNPRR

SEQ ID NO: 5729 - protein, 11 aa, Artificial
  IGFBP-2 heparin binding domain-containing peptide sequence
KHHVGINNPRR

SEQ ID NO: 5730 - protein, 11 aa, Artificial
  IGFBP-2 heparin binding domain-containing peptide sequence
RHHVGINNPRR

SEQ ID NO: 5731 - protein, 11 aa, Artificial
  IGFBP-2 heparin binding domain-containing peptide sequence
HHHVGINNPRR

SEQ ID NO: 5732 - protein, 11 aa, Artificial
  IGFBP-2 heparin binding domain-containing peptide sequence
KKHVGINNPRR

SEQ ID NO: 5733 - protein, 11 aa, Artificial
  IGFBP-2 heparin binding domain-containing peptide sequence
RKHVGINNPRR

SEQ ID NO: 5734 - protein, 11 aa, Artificial
  IGFBP-2 heparin binding domain-containing peptide sequence
HKHVGINNPRR

SEQ ID NO: 5735 - protein, 11 aa, Artificial
  IGFBP-2 heparin binding domain-containing peptide sequence
KRHVGINNPRR

SEQ ID NO: 5736 - protein, 11 aa, Artificial
  IGFBP-2 heparin binding domain-containing peptide sequence
RRHVGINNPRR

SEQ ID NO: 5737 - protein, 11 aa, Artificial
  IGFBP-2 heparin binding domain-containing peptide sequence
HRHVGINNPRR

SEQ ID NO: 5738 - protein, 11 aa, Artificial
  IGFBP-2 heparin binding domain-containing peptide sequence
KHKVGINNPRR

SEQ ID NO: 5739 - protein, 11 aa, Artificial
  IGFBP-2 heparin binding domain-containing peptide sequence
RHKVGINNPRR

SEQ ID NO: 5740 - protein, 11 aa, Artificial
  IGFBP-2 heparin binding domain-containing peptide sequence
HHKVGINNPRR

SEQ ID NO: 5741 - protein, 11 aa, Artificial
  IGFBP-2 heparin binding domain-containing peptide sequence
KKKVGINNPRR

SEQ ID NO: 5742 - protein, 11 aa, Artificial
  IGFBP-2 heparin binding domain-containing peptide sequence
RKKVGINNPRR

SEQ ID NO: 5743 - protein, 11 aa, Artificial
  IGFBP-2 heparin binding domain-containing peptide sequence
HKKVGINNPRR

SEQ ID NO: 5744 - protein, 11 aa, Artificial
  IGFBP-2 heparin binding domain-containing peptide sequence
KRKVGINNPRR

SEQ ID NO: 5745 - protein, 11 aa, Artificial
  IGFBP-2 heparin binding domain-containing peptide sequence
RRKVGINNPRR

SEQ ID NO: 5746 - protein, 11 aa, Artificial
  IGFBP-2 heparin binding domain-containing peptide sequence
HRKVGINNPRR

SEQ ID NO: 5747 - protein, 11 aa, Artificial
  IGFBP-2 heparin binding domain-containing peptide sequence
KHRVGINNPRR

SEQ ID NO: 5748 - protein, 11 aa, Artificial
  IGFBP-2 heparin binding domain-containing peptide sequence
RHRVGINNPRR

SEQ ID NO: 5749 - protein, 11 aa, Artificial
  IGFBP-2 heparin binding domain-containing peptide sequence
HHRVGINNPRR

SEQ ID NO: 5750 - protein, 11 aa, Artificial
  IGFBP-2 heparin binding domain-containing peptide sequence
KKRVGINNPRR

SEQ ID NO: 5751 - protein, 11 aa, Artificial
  IGFBP-2 heparin binding domain-containing peptide sequence
RKRVGINNPRR

SEQ ID NO: 5752 - protein, 11 aa, Artificial
  IGFBP-2 heparin binding domain-containing peptide sequence
HKRVGINNPRR

SEQ ID NO: 5753 - protein, 11 aa, Artificial
  IGFBP-2 heparin binding domain-containing peptide sequence
KRRVGINNPRR

SEQ ID NO: 5754 - protein, 11 aa, Artificial
  IGFBP-2 heparin binding domain-containing peptide sequence
RRRVGINNPRR

SEQ ID NO: 5755 - protein, 11 aa, Artificial
  IGFBP-2 heparin binding domain-containing peptide sequence
HRRVGINNPRR

SEQ ID NO: 5756 - protein, 11 aa, Artificial
  IGFBP-2 heparin binding domain-containing peptide sequence
KHHLGVNNPRR

SEQ ID NO: 5757 - protein, 11 aa, Artificial
  IGFBP-2 heparin binding domain-containing peptide sequence
RHHLGVNNPRR

SEQ ID NO: 5758 - protein, 11 aa, Artificial
  IGFBP-2 heparin binding domain-containing peptide sequence
HHHLGVNNPRR

SEQ ID NO: 5759 - protein, 11 aa, Artificial
  IGFBP-2 heparin binding domain-containing peptide sequence
KKHLGVNNPRR

SEQ ID NO: 5760 - protein, 11 aa, Artificial
  IGFBP-2 heparin binding domain-containing peptide sequence
RKHLGVNNPRR

SEQ ID NO: 5761 - protein, 11 aa, Artificial
  IGFBP-2 heparin binding domain-containing peptide sequence
HKHLGVNNPRR

SEQ ID NO: 5762 - protein, 11 aa, Artificial
  IGFBP-2 heparin binding domain-containing peptide sequence
KRHLGVNNPRR

SEQ ID NO: 5763 - protein, 11 aa, Artificial
  IGFBP-2 heparin binding domain-containing peptide sequence
RRHLGVNNPRR

SEQ ID NO: 5764 - protein, 11 aa, Artificial
  IGFBP-2 heparin binding domain-containing peptide sequence
HRHLGVNNPRR

SEQ ID NO: 5765 - protein, 11 aa, Artificial
  IGFBP-2 heparin binding domain-containing peptide sequence
KHKLGVNNPRR

SEQ ID NO: 5766 - protein, 11 aa, Artificial
  IGFBP-2 heparin binding domain-containing peptide sequence
RHKLGVNNPRR

SEQ ID NO: 5767 - protein, 11 aa, Artificial
  IGFBP-2 heparin binding domain-containing peptide sequence
HHKLGVNNPRR

SEQ ID NO: 5768 - protein, 11 aa, Artificial
  IGFBP-2 heparin binding domain-containing peptide sequence
KKKLGVNNPRR

SEQ ID NO: 5769 - protein, 11 aa, Artificial
  IGFBP-2 heparin binding domain-containing peptide sequence
RKKLGVNNPRR

SEQ ID NO: 5770 - protein, 11 aa, Artificial
  IGFBP-2 heparin binding domain-containing peptide sequence
HKKLGVNNPRR

SEQ ID NO: 5771 - protein, 11 aa, Artificial
  IGFBP-2 heparin binding domain-containing peptide sequence
KRKLGVNNPRR

SEQ ID NO: 5772 - protein, 11 aa, Artificial
  IGFBP-2 heparin binding domain-containing peptide sequence
RRKLGVNNPRR

SEQ ID NO: 5773 - protein, 11 aa, Artificial
  IGFBP-2 heparin binding domain-containing peptide sequence
HRKLGVNNPRR

SEQ ID NO: 5774 - protein, 11 aa, Artificial
  IGFBP-2 heparin binding domain-containing peptide sequence
KHRLGVNNPRR

SEQ ID NO: 5775 - protein, 11 aa, Artificial
  IGFBP-2 heparin binding domain-containing peptide sequence
RHRLGVNNPRR

SEQ ID NO: 5776 - protein, 11 aa, Artificial
  IGFBP-2 heparin binding domain-containing peptide sequence
HHRLGVNNPRR

SEQ ID NO: 5777 - protein, 11 aa, Artificial
  IGFBP-2 heparin binding domain-containing peptide sequence
KKRLGVNNPRR

SEQ ID NO: 5778 - protein, 11 aa, Artificial
  IGFBP-2 heparin binding domain-containing peptide sequence
RKRLGVNNPRR

SEQ ID NO: 5779 - protein, 11 aa, Artificial
  IGFBP-2 heparin binding domain-containing peptide sequence
HKRLGVNNPRR

SEQ ID NO: 5780 - protein, 11 aa, Artificial
  IGFBP-2 heparin binding domain-containing peptide sequence
KRRLGVNNPRR

SEQ ID NO: 5781 - protein, 11 aa, Artificial
  IGFBP-2 heparin binding domain-containing peptide sequence
RRRLGVNNPRR

SEQ ID NO: 5782 - protein, 11 aa, Artificial
  IGFBP-2 heparin binding domain-containing peptide sequence
HRRLGVNNPRR

SEQ ID NO: 5783 - protein, 11 aa, Artificial
  IGFBP-2 heparin binding domain-containing peptide sequence
KHHIGVNNPRR

SEQ ID NO: 5784 - protein, 11 aa, Artificial
  IGFBP-2 heparin binding domain-containing peptide sequence
RHHIGVNNPRR

SEQ ID NO: 5785 - protein, 11 aa, Artificial
  IGFBP-2 heparin binding domain-containing peptide sequence
HHHIGVNNPRR

SEQ ID NO: 5786 - protein, 11 aa, Artificial
  IGFBP-2 heparin binding domain-containing peptide sequence
KKHIGVNNPRR

SEQ ID NO: 5787 - protein, 11 aa, Artificial
  IGFBP-2 heparin binding domain-containing peptide sequence
RKHIGVNNPRR

SEQ ID NO: 5788 - protein, 11 aa, Artificial
  IGFBP-2 heparin binding domain-containing peptide sequence
HKHIGVNNPRR

SEQ ID NO: 5789 - protein, 11 aa, Artificial
  IGFBP-2 heparin binding domain-containing peptide sequence
KRHIGVNNPRR

SEQ ID NO: 5790 - protein, 11 aa, Artificial
  IGFBP-2 heparin binding domain-containing peptide sequence
RRHIGVNNPRR

SEQ ID NO: 5791 - protein, 11 aa, Artificial
  IGFBP-2 heparin binding domain-containing peptide sequence
HRHIGVNNPRR

SEQ ID NO: 5792 - protein, 11 aa, Artificial
  IGFBP-2 heparin binding domain-containing peptide sequence
KHKIGVNNPRR

SEQ ID NO: 5793 - protein, 11 aa, Artificial
  IGFBP-2 heparin binding domain-containing peptide sequence
RHKIGVNNPRR

SEQ ID NO: 5794 - protein, 11 aa, Artificial
  IGFBP-2 heparin binding domain-containing peptide sequence
HHKIGVNNPRR

SEQ ID NO: 5795 - protein, 11 aa, Artificial
  IGFBP-2 heparin binding domain-containing peptide sequence
KKKIGVNNPRR

SEQ ID NO: 5796 - protein, 11 aa, Artificial
  IGFBP-2 heparin binding domain-containing peptide sequence
RKKIGVNNPRR

SEQ ID NO: 5797 - protein, 11 aa, Artificial
  IGFBP-2 heparin binding domain-containing peptide sequence
HKKIGVNNPRR

SEQ ID NO: 5798 - protein, 11 aa, Artificial
  IGFBP-2 heparin binding domain-containing peptide sequence
KRKIGVNNPRR

SEQ ID NO: 5799 - protein, 11 aa, Artificial
  IGFBP-2 heparin binding domain-containing peptide sequence
RRKIGVNNPRR

SEQ ID NO: 5800 - protein, 11 aa, Artificial
  IGFBP-2 heparin binding domain-containing peptide sequence
HRKIGVNNPRR

SEQ ID NO: 5801 - protein, 11 aa, Artificial
  IGFBP-2 heparin binding domain-containing peptide sequence
KHRIGVNNPRR

SEQ ID NO: 5802 - protein, 11 aa, Artificial
  IGFBP-2 heparin binding domain-containing peptide sequence
RHRIGVNNPRR

SEQ ID NO: 5803 - protein, 11 aa, Artificial
  IGFBP-2 heparin binding domain-containing peptide sequence
HHRIGVNNPRR

SEQ ID NO: 5804 - protein, 11 aa, Artificial
  IGFBP-2 heparin binding domain-containing peptide sequence
KKRIGVNNPRR

SEQ ID NO: 5805 - protein, 11 aa, Artificial
  IGFBP-2 heparin binding domain-containing peptide sequence
RKRIGVNNPRR

SEQ ID NO: 5806 - protein, 11 aa, Artificial
  IGFBP-2 heparin binding domain-containing peptide sequence
HKRIGVNNPRR

SEQ ID NO: 5807 - protein, 11 aa, Artificial
  IGFBP-2 heparin binding domain-containing peptide sequence
KRRIGVNNPRR

SEQ ID NO: 5808 - protein, 11 aa, Artificial
  IGFBP-2 heparin binding domain-containing peptide sequence
RRRIGVNNPRR

SEQ ID NO: 5809 - protein, 11 aa, Artificial
  IGFBP-2 heparin binding domain-containing peptide sequence
HRRIGVNNPRR

SEQ ID NO: 5810 - protein, 11 aa, Artificial
  IGFBP-2 heparin binding domain-containing peptide sequence
KHHVGVNNPRR

SEQ ID NO: 5811 - protein, 11 aa, Artificial
  IGFBP-2 heparin binding domain-containing peptide sequence
RHHVGVNNPRR

SEQ ID NO: 5812 - protein, 11 aa, Artificial
  IGFBP-2 heparin binding domain-containing peptide sequence
HHHVGVNNPRR

SEQ ID NO: 5813 - protein, 11 aa, Artificial
  IGFBP-2 heparin binding domain-containing peptide sequence
KKHVGVNNPRR

SEQ ID NO: 5814 - protein, 11 aa, Artificial
  IGFBP-2 heparin binding domain-containing peptide sequence
RKHVGVNNPRR

SEQ ID NO: 5815 - protein, 11 aa, Artificial
  IGFBP-2 heparin binding domain-containing peptide sequence
HKHVGVNNPRR

SEQ ID NO: 5816 - protein, 11 aa, Artificial
  IGFBP-2 heparin binding domain-containing peptide sequence
KRHVGVNNPRR

SEQ ID NO: 5817 - protein, 11 aa, Artificial
  IGFBP-2 heparin binding domain-containing peptide sequence
RRHVGVNNPRR

SEQ ID NO: 5818 - protein, 11 aa, Artificial
  IGFBP-2 heparin binding domain-containing peptide sequence
HRHVGVNNPRR

SEQ ID NO: 5819 - protein, 11 aa, Artificial
  IGFBP-2 heparin binding domain-containing peptide sequence
KHKVGVNNPRR

SEQ ID NO: 5820 - protein, 11 aa, Artificial
  IGFBP-2 heparin binding domain-containing peptide sequence
RHKVGVNNPRR

SEQ ID NO: 5821 - protein, 11 aa, Artificial
  IGFBP-2 heparin binding domain-containing peptide sequence
HHKVGVNNPRR

SEQ ID NO: 5822 - protein, 11 aa, Artificial
  IGFBP-2 heparin binding domain-containing peptide sequence
KKKVGVNNPRR

SEQ ID NO: 5823 - protein, 11 aa, Artificial
  IGFBP-2 heparin binding domain-containing peptide sequence
RKKVGVNNPRR

SEQ ID NO: 5824 - protein, 11 aa, Artificial
  IGFBP-2 heparin binding domain-containing peptide sequence
HKKVGVNNPRR

SEQ ID NO: 5825 - protein, 11 aa, Artificial
  IGFBP-2 heparin binding domain-containing peptide sequence
KRKVGVNNPRR

SEQ ID NO: 5826 - protein, 11 aa, Artificial
  IGFBP-2 heparin binding domain-containing peptide sequence
RRKVGVNNPRR

SEQ ID NO: 5827 - protein, 11 aa, Artificial
  IGFBP-2 heparin binding domain-containing peptide sequence
HRKVGVNNPRR

SEQ ID NO: 5828 - protein, 11 aa, Artificial
  IGFBP-2 heparin binding domain-containing peptide sequence
KHRVGVNNPRR

SEQ ID NO: 5829 - protein, 11 aa, Artificial
  IGFBP-2 heparin binding domain-containing peptide sequence
RHRVGVNNPRR

SEQ ID NO: 5830 - protein, 11 aa, Artificial
  IGFBP-2 heparin binding domain-containing peptide sequence
HHRVGVNNPRR

SEQ ID NO: 5831 - protein, 11 aa, Artificial
  IGFBP-2 heparin binding domain-containing peptide sequence
KKRVGVNNPRR

SEQ ID NO: 5832 - protein, 11 aa, Artificial
  IGFBP-2 heparin binding domain-containing peptide sequence
RKRVGVNNPRR

SEQ ID NO: 5833 - protein, 11 aa, Artificial
  IGFBP-2 heparin binding domain-containing peptide sequence
HKRVGVNNPRR

SEQ ID NO: 5834 - protein, 11 aa, Artificial
  IGFBP-2 heparin binding domain-containing peptide sequence
KRRVGVNNPRR

SEQ ID NO: 5835 - protein, 11 aa, Artificial
  IGFBP-2 heparin binding domain-containing peptide sequence
RRRVGVNNPRR

SEQ ID NO: 5836 - protein, 11 aa, Artificial
  IGFBP-2 heparin binding domain-containing peptide sequence
HRRVGVNNPRR

SEQ ID NO: 5837 - protein, 11 aa, Artificial
  IGFBP-2 heparin binding domain-containing peptide sequence
KHHLGLEEPRH

SEQ ID NO: 5838 - protein, 11 aa, Artificial
  IGFBP-2 heparin binding domain-containing peptide sequence
RHHLGLEEPRH

SEQ ID NO: 5839 - protein, 11 aa, Artificial
  IGFBP-2 heparin binding domain-containing peptide sequence
HHHLGLEEPRH

SEQ ID NO: 5840 - protein, 11 aa, Artificial
  IGFBP-2 heparin binding domain-containing peptide sequence
KKHLGLEEPRH

SEQ ID NO: 5841 - protein, 11 aa, Artificial
  IGFBP-2 heparin binding domain-containing peptide sequence
RKHLGLEEPRH

SEQ ID NO: 5842 - protein, 11 aa, Artificial
  IGFBP-2 heparin binding domain-containing peptide sequence
HKHLGLEEPRH

SEQ ID NO: 5843 - protein, 11 aa, Artificial
  IGFBP-2 heparin binding domain-containing peptide sequence
KRHLGLEEPRH

SEQ ID NO: 5844 - protein, 11 aa, Artificial
  IGFBP-2 heparin binding domain-containing peptide sequence
RRHLGLEEPRH

SEQ ID NO: 5845 - protein, 11 aa, Artificial
  IGFBP-2 heparin binding domain-containing peptide sequence
HRHLGLEEPRH

SEQ ID NO: 5846 - protein, 11 aa, Artificial
  IGFBP-2 heparin binding domain-containing peptide sequence
KHKLGLEEPRH

SEQ ID NO: 5847 - protein, 11 aa, Artificial
  IGFBP-2 heparin binding domain-containing peptide sequence
RHKLGLEEPRH

SEQ ID NO: 5848 - protein, 11 aa, Artificial
  IGFBP-2 heparin binding domain-containing peptide sequence
HHKLGLEEPRH

SEQ ID NO: 5849 - protein, 11 aa, Artificial
  IGFBP-2 heparin binding domain-containing peptide sequence
KKKLGLEEPRH

SEQ ID NO: 5850 - protein, 11 aa, Artificial
  IGFBP-2 heparin binding domain-containing peptide sequence
RKKLGLEEPRH

SEQ ID NO: 5851 - protein, 11 aa, Artificial
  IGFBP-2 heparin binding domain-containing peptide sequence
HKKLGLEEPRH

SEQ ID NO: 5852 - protein, 11 aa, Artificial
  IGFBP-2 heparin binding domain-containing peptide sequence
KRKLGLEEPRH

SEQ ID NO: 5853 - protein, 11 aa, Artificial
  IGFBP-2 heparin binding domain-containing peptide sequence
RRKLGLEEPRH

SEQ ID NO: 5854 - protein, 11 aa, Artificial
  IGFBP-2 heparin binding domain-containing peptide sequence
HRKLGLEEPRH

SEQ ID NO: 5855 - protein, 11 aa, Artificial
  IGFBP-2 heparin binding domain-containing peptide sequence
KHRLGLEEPRH

SEQ ID NO: 5856 - protein, 11 aa, Artificial
  IGFBP-2 heparin binding domain-containing peptide sequence
RHRLGLEEPRH

SEQ ID NO: 5857 - protein, 11 aa, Artificial
  IGFBP-2 heparin binding domain-containing peptide sequence
HHRLGLEEPRH

SEQ ID NO: 5858 - protein, 11 aa, Artificial
  IGFBP-2 heparin binding domain-containing peptide sequence
KKRLGLEEPRH

SEQ ID NO: 5859 - protein, 11 aa, Artificial
  IGFBP-2 heparin binding domain-containing peptide sequence
RKRLGLEEPRH

SEQ ID NO: 5860 - protein, 11 aa, Artificial
  IGFBP-2 heparin binding domain-containing peptide sequence
HKRLGLEEPRH

SEQ ID NO: 5861 - protein, 11 aa, Artificial
  IGFBP-2 heparin binding domain-containing peptide sequence
KRRLGLEEPRH

SEQ ID NO: 5862 - protein, 11 aa, Artificial
  IGFBP-2 heparin binding domain-containing peptide sequence
RRRLGLEEPRH

SEQ ID NO: 5863 - protein, 11 aa, Artificial
  IGFBP-2 heparin binding domain-containing peptide sequence
HRRLGLEEPRH

SEQ ID NO: 5864 - protein, 11 aa, Artificial
  IGFBP-2 heparin binding domain-containing peptide sequence
KHHIGLEEPRH

SEQ ID NO: 5865 - protein, 11 aa, Artificial
  IGFBP-2 heparin binding domain-containing peptide sequence
RHHIGLEEPRH

SEQ ID NO: 5866 - protein, 11 aa, Artificial
  IGFBP-2 heparin binding domain-containing peptide sequence
HHHIGLEEPRH

SEQ ID NO: 5867 - protein, 11 aa, Artificial
  IGFBP-2 heparin binding domain-containing peptide sequence
KKHIGLEEPRH

SEQ ID NO: 5868 - protein, 11 aa, Artificial
  IGFBP-2 heparin binding domain-containing peptide sequence
RKHIGLEEPRH

SEQ ID NO: 5869 - protein, 11 aa, Artificial
  IGFBP-2 heparin binding domain-containing peptide sequence
HKHIGLEEPRH

SEQ ID NO: 5870 - protein, 11 aa, Artificial
  IGFBP-2 heparin binding domain-containing peptide sequence
KRHIGLEEPRH

SEQ ID NO: 5871 - protein, 11 aa, Artificial
  IGFBP-2 heparin binding domain-containing peptide sequence
RRHIGLEEPRH

SEQ ID NO: 5872 - protein, 11 aa, Artificial
  IGFBP-2 heparin binding domain-containing peptide sequence
HRHIGLEEPRH

SEQ ID NO: 5873 - protein, 11 aa, Artificial
  IGFBP-2 heparin binding domain-containing peptide sequence
KHKIGLEEPRH

SEQ ID NO: 5874 - protein, 11 aa, Artificial
  IGFBP-2 heparin binding domain-containing peptide sequence
RHKIGLEEPRH

SEQ ID NO: 5875 - protein, 11 aa, Artificial
  IGFBP-2 heparin binding domain-containing peptide sequence
HHKIGLEEPRH

SEQ ID NO: 5876 - protein, 11 aa, Artificial
  IGFBP-2 heparin binding domain-containing peptide sequence
KKKIGLEEPRH

SEQ ID NO: 5877 - protein, 11 aa, Artificial
  IGFBP-2 heparin binding domain-containing peptide sequence
RKKIGLEEPRH

SEQ ID NO: 5878 - protein, 11 aa, Artificial
  IGFBP-2 heparin binding domain-containing peptide sequence
HKKIGLEEPRH

SEQ ID NO: 5879 - protein, 11 aa, Artificial
  IGFBP-2 heparin binding domain-containing peptide sequence
KRKIGLEEPRH

SEQ ID NO: 5880 - protein, 11 aa, Artificial
  IGFBP-2 heparin binding domain-containing peptide sequence
RRKIGLEEPRH

SEQ ID NO: 5881 - protein, 11 aa, Artificial
  IGFBP-2 heparin binding domain-containing peptide sequence
HRKIGLEEPRH

SEQ ID NO: 5882 - protein, 11 aa, Artificial
  IGFBP-2 heparin binding domain-containing peptide sequence
KHRIGLEEPRH

SEQ ID NO: 5883 - protein, 11 aa, Artificial
  IGFBP-2 heparin binding domain-containing peptide sequence
RHRIGLEEPRH

SEQ ID NO: 5884 - protein, 11 aa, Artificial
  IGFBP-2 heparin binding domain-containing peptide sequence
HHRIGLEEPRH

SEQ ID NO: 5885 - protein, 11 aa, Artificial
  IGFBP-2 heparin binding domain-containing peptide sequence
KKRIGLEEPRH

SEQ ID NO: 5886 - protein, 11 aa, Artificial
  IGFBP-2 heparin binding domain-containing peptide sequence
RKRIGLEEPRH

SEQ ID NO: 5887 - protein, 11 aa, Artificial
  IGFBP-2 heparin binding domain-containing peptide sequence
HKRIGLEEPRH

SEQ ID NO: 5888 - protein, 11 aa, Artificial
  IGFBP-2 heparin binding domain-containing peptide sequence
KRRIGLEEPRH

SEQ ID NO: 5889 - protein, 11 aa, Artificial
  IGFBP-2 heparin binding domain-containing peptide sequence
RRRIGLEEPRH

SEQ ID NO: 5890 - protein, 11 aa, Artificial
  IGFBP-2 heparin binding domain-containing peptide sequence
HRRIGLEEPRH

SEQ ID NO: 5891 - protein, 11 aa, Artificial
  IGFBP-2 heparin binding domain-containing peptide sequence
KHHVGLEEPRH

SEQ ID NO: 5892 - protein, 11 aa, Artificial
  IGFBP-2 heparin binding domain-containing peptide sequence
RHHVGLEEPRH

SEQ ID NO: 5893 - protein, 11 aa, Artificial
  IGFBP-2 heparin binding domain-containing peptide sequence
HHHVGLEEPRH

SEQ ID NO: 5894 - protein, 11 aa, Artificial
  IGFBP-2 heparin binding domain-containing peptide sequence
KKHVGLEEPRH

SEQ ID NO: 5895 - protein, 11 aa, Artificial
  IGFBP-2 heparin binding domain-containing peptide sequence
RKHVGLEEPRH

SEQ ID NO: 5896 - protein, 11 aa, Artificial
  IGFBP-2 heparin binding domain-containing peptide sequence
HKHVGLEEPRH

SEQ ID NO: 5897 - protein, 11 aa, Artificial
  IGFBP-2 heparin binding domain-containing peptide sequence
KRHVGLEEPRH

SEQ ID NO: 5898 - protein, 11 aa, Artificial
  IGFBP-2 heparin binding domain-containing peptide sequence
RRHVGLEEPRH

SEQ ID NO: 5899 - protein, 11 aa, Artificial
  IGFBP-2 heparin binding domain-containing peptide sequence
HRHVGLEEPRH

SEQ ID NO: 5900 - protein, 11 aa, Artificial
  IGFBP-2 heparin binding domain-containing peptide sequence
KHKVGLEEPRH

SEQ ID NO: 5901 - protein, 11 aa, Artificial
  IGFBP-2 heparin binding domain-containing peptide sequence
RHKVGLEEPRH

SEQ ID NO: 5902 - protein, 11 aa, Artificial
  IGFBP-2 heparin binding domain-containing peptide sequence
HHKVGLEEPRH

SEQ ID NO: 5903 - protein, 11 aa, Artificial
  IGFBP-2 heparin binding domain-containing peptide sequence
KKKVGLEEPRH

SEQ ID NO: 5904 - protein, 11 aa, Artificial
  IGFBP-2 heparin binding domain-containing peptide sequence
RKKVGLEEPRH

SEQ ID NO: 5905 - protein, 11 aa, Artificial
  IGFBP-2 heparin binding domain-containing peptide sequence
HKKVGLEEPRH

SEQ ID NO: 5906 - protein, 11 aa, Artificial
  IGFBP-2 heparin binding domain-containing peptide sequence
KRKVGLEEPRH

SEQ ID NO: 5907 - protein, 11 aa, Artificial
  IGFBP-2 heparin binding domain-containing peptide sequence
RRKVGLEEPRH

SEQ ID NO: 5908 - protein, 11 aa, Artificial
  IGFBP-2 heparin binding domain-containing peptide sequence
HRKVGLEEPRH

SEQ ID NO: 5909 - protein, 11 aa, Artificial
  IGFBP-2 heparin binding domain-containing peptide sequence
KHRVGLEEPRH

SEQ ID NO: 5910 - protein, 11 aa, Artificial
  IGFBP-2 heparin binding domain-containing peptide sequence
RHRVGLEEPRH

SEQ ID NO: 5911 - protein, 11 aa, Artificial
  IGFBP-2 heparin binding domain-containing peptide sequence
HHRVGLEEPRH

SEQ ID NO: 5912 - protein, 11 aa, Artificial
  IGFBP-2 heparin binding domain-containing peptide sequence
KKRVGLEEPRH

SEQ ID NO: 5913 - protein, 11 aa, Artificial
  IGFBP-2 heparin binding domain-containing peptide sequence
RKRVGLEEPRH

SEQ ID NO: 5914 - protein, 11 aa, Artificial
  IGFBP-2 heparin binding domain-containing peptide sequence
HKRVGLEEPRH

SEQ ID NO: 5915 - protein, 11 aa, Artificial
  IGFBP-2 heparin binding domain-containing peptide sequence
KRRVGLEEPRH

SEQ ID NO: 5916 - protein, 11 aa, Artificial
  IGFBP-2 heparin binding domain-containing peptide sequence
RRRVGLEEPRH

SEQ ID NO: 5917 - protein, 11 aa, Artificial
  IGFBP-2 heparin binding domain-containing peptide sequence
HRRVGLEEPRH

SEQ ID NO: 5918 - protein, 11 aa, Artificial
  IGFBP-2 heparin binding domain-containing peptide sequence
KHHLGIEEPRH

SEQ ID NO: 5919 - protein, 11 aa, Artificial
  IGFBP-2 heparin binding domain-containing peptide sequence
RHHLGIEEPRH

SEQ ID NO: 5920 - protein, 11 aa, Artificial
  IGFBP-2 heparin binding domain-containing peptide sequence
HHHLGIEEPRH

SEQ ID NO: 5921 - protein, 11 aa, Artificial
  IGFBP-2 heparin binding domain-containing peptide sequence
KKHLGIEEPRH

SEQ ID NO: 5922 - protein, 11 aa, Artificial
  IGFBP-2 heparin binding domain-containing peptide sequence
RKHLGIEEPRH

SEQ ID NO: 5923 - protein, 11 aa, Artificial
  IGFBP-2 heparin binding domain-containing peptide sequence
HKHLGIEEPRH

SEQ ID NO: 5924 - protein, 11 aa, Artificial
  IGFBP-2 heparin binding domain-containing peptide sequence
KRHLGIEEPRH

SEQ ID NO: 5925 - protein, 11 aa, Artificial
  IGFBP-2 heparin binding domain-containing peptide sequence
RRHLGIEEPRH

SEQ ID NO: 5926 - protein, 11 aa, Artificial
  IGFBP-2 heparin binding domain-containing peptide sequence
HRHLGIEEPRH

SEQ ID NO: 5927 - protein, 11 aa, Artificial
  IGFBP-2 heparin binding domain-containing peptide sequence
KHKLGIEEPRH

SEQ ID NO: 5928 - protein, 11 aa, Artificial
  IGFBP-2 heparin binding domain-containing peptide sequence
RHKLGIEEPRH

SEQ ID NO: 5929 - protein, 11 aa, Artificial
  IGFBP-2 heparin binding domain-containing peptide sequence
HHKLGIEEPRH

SEQ ID NO: 5930 - protein, 11 aa, Artificial
  IGFBP-2 heparin binding domain-containing peptide sequence
KKKLGIEEPRH

SEQ ID NO: 5931 - protein, 11 aa, Artificial
  IGFBP-2 heparin binding domain-containing peptide sequence
RKKLGIEEPRH

SEQ ID NO: 5932 - protein, 11 aa, Artificial
  IGFBP-2 heparin binding domain-containing peptide sequence
HKKLGIEEPRH

SEQ ID NO: 5933 - protein, 11 aa, Artificial
  IGFBP-2 heparin binding domain-containing peptide sequence
KRKLGIEEPRH

SEQ ID NO: 5934 - protein, 11 aa, Artificial
  IGFBP-2 heparin binding domain-containing peptide sequence
RRKLGIEEPRH

SEQ ID NO: 5935 - protein, 11 aa, Artificial
  IGFBP-2 heparin binding domain-containing peptide sequence
HRKLGIEEPRH

SEQ ID NO: 5936 - protein, 11 aa, Artificial
  IGFBP-2 heparin binding domain-containing peptide sequence
KHRLGIEEPRH

SEQ ID NO: 5937 - protein, 11 aa, Artificial
  IGFBP-2 heparin binding domain-containing peptide sequence
RHRLGIEEPRH

SEQ ID NO: 5938 - protein, 11 aa, Artificial
  IGFBP-2 heparin binding domain-containing peptide sequence
HHRLGIEEPRH

SEQ ID NO: 5939 - protein, 11 aa, Artificial
  IGFBP-2 heparin binding domain-containing peptide sequence
KKRLGIEEPRH

SEQ ID NO: 5940 - protein, 11 aa, Artificial
  IGFBP-2 heparin binding domain-containing peptide sequence
RKRLGIEEPRH

SEQ ID NO: 5941 - protein, 11 aa, Artificial
  IGFBP-2 heparin binding domain-containing peptide sequence
HKRLGIEEPRH

SEQ ID NO: 5942 - protein, 11 aa, Artificial
  IGFBP-2 heparin binding domain-containing peptide sequence
KRRLGIEEPRH

SEQ ID NO: 5943 - protein, 11 aa, Artificial
  IGFBP-2 heparin binding domain-containing peptide sequence
RRRLGIEEPRH

SEQ ID NO: 5944 - protein, 11 aa, Artificial
  IGFBP-2 heparin binding domain-containing peptide sequence
HRRLGIEEPRH

SEQ ID NO: 5945 - protein, 11 aa, Artificial
  IGFBP-2 heparin binding domain-containing peptide sequence
KHHIGIEEPRH

SEQ ID NO: 5946 - protein, 11 aa, Artificial
  IGFBP-2 heparin binding domain-containing peptide sequence
RHHIGIEEPRH

SEQ ID NO: 5947 - protein, 11 aa, Artificial
  IGFBP-2 heparin binding domain-containing peptide sequence
HHHIGIEEPRH

SEQ ID NO: 5948 - protein, 11 aa, Artificial
  IGFBP-2 heparin binding domain-containing peptide sequence
KKHIGIEEPRH

SEQ ID NO: 5949 - protein, 11 aa, Artificial
  IGFBP-2 heparin binding domain-containing peptide sequence
RKHIGIEEPRH

SEQ ID NO: 5950 - protein, 11 aa, Artificial
  IGFBP-2 heparin binding domain-containing peptide sequence
HKHIGIEEPRH

SEQ ID NO: 5951 - protein, 11 aa, Artificial
  IGFBP-2 heparin binding domain-containing peptide sequence
KRHIGIEEPRH

SEQ ID NO: 5952 - protein, 11 aa, Artificial
  IGFBP-2 heparin binding domain-containing peptide sequence
RRHIGIEEPRH

SEQ ID NO: 5953 - protein, 11 aa, Artificial
  IGFBP-2 heparin binding domain-containing peptide sequence
HRHIGIEEPRH

SEQ ID NO: 5954 - protein, 11 aa, Artificial
  IGFBP-2 heparin binding domain-containing peptide sequence
KHKIGIEEPRH

SEQ ID NO: 5955 - protein, 11 aa, Artificial
  IGFBP-2 heparin binding domain-containing peptide sequence
RHKIGIEEPRH

SEQ ID NO: 5956 - protein, 11 aa, Artificial
  IGFBP-2 heparin binding domain-containing peptide sequence
HHKIGIEEPRH

SEQ ID NO: 5957 - protein, 11 aa, Artificial
  IGFBP-2 heparin binding domain-containing peptide sequence
KKKIGIEEPRH

SEQ ID NO: 5958 - protein, 11 aa, Artificial
  IGFBP-2 heparin binding domain-containing peptide sequence
RKKIGIEEPRH

SEQ ID NO: 5959 - protein, 11 aa, Artificial
  IGFBP-2 heparin binding domain-containing peptide sequence
HKKIGIEEPRH

SEQ ID NO: 5960 - protein, 11 aa, Artificial
  IGFBP-2 heparin binding domain-containing peptide sequence
KRKIGIEEPRH

SEQ ID NO: 5961 - protein, 11 aa, Artificial
  IGFBP-2 heparin binding domain-containing peptide sequence
RRKIGIEEPRH

SEQ ID NO: 5962 - protein, 11 aa, Artificial
  IGFBP-2 heparin binding domain-containing peptide sequence
HRKIGIEEPRH

SEQ ID NO: 5963 - protein, 11 aa, Artificial
  IGFBP-2 heparin binding domain-containing peptide sequence
KHRIGIEEPRH

SEQ ID NO: 5964 - protein, 11 aa, Artificial
  IGFBP-2 heparin binding domain-containing peptide sequence
RHRIGIEEPRH

SEQ ID NO: 5965 - protein, 11 aa, Artificial
  IGFBP-2 heparin binding domain-containing peptide sequence
HHRIGIEEPRH

SEQ ID NO: 5966 - protein, 11 aa, Artificial
  IGFBP-2 heparin binding domain-containing peptide sequence
KKRIGIEEPRH

SEQ ID NO: 5967 - protein, 11 aa, Artificial
  IGFBP-2 heparin binding domain-containing peptide sequence
RKRIGIEEPRH

SEQ ID NO: 5968 - protein, 11 aa, Artificial
  IGFBP-2 heparin binding domain-containing peptide sequence
HKRIGIEEPRH

SEQ ID NO: 5969 - protein, 11 aa, Artificial
  IGFBP-2 heparin binding domain-containing peptide sequence
KRRIGIEEPRH

SEQ ID NO: 5970 - protein, 11 aa, Artificial
  IGFBP-2 heparin binding domain-containing peptide sequence
RRRIGIEEPRH

SEQ ID NO: 5971 - protein, 11 aa, Artificial
  IGFBP-2 heparin binding domain-containing peptide sequence
HRRIGIEEPRH

SEQ ID NO: 5972 - protein, 11 aa, Artificial
  IGFBP-2 heparin binding domain-containing peptide sequence
KHHVGIEEPRH

SEQ ID NO: 5973 - protein, 11 aa, Artificial
  IGFBP-2 heparin binding domain-containing peptide sequence
RHHVGIEEPRH

SEQ ID NO: 5974 - protein, 11 aa, Artificial
  IGFBP-2 heparin binding domain-containing peptide sequence
HHHVGIEEPRH

SEQ ID NO: 5975 - protein, 11 aa, Artificial
  IGFBP-2 heparin binding domain-containing peptide sequence
KKHVGIEEPRH

SEQ ID NO: 5976 - protein, 11 aa, Artificial
  IGFBP-2 heparin binding domain-containing peptide sequence
RKHVGIEEPRH

SEQ ID NO: 5977 - protein, 11 aa, Artificial
  IGFBP-2 heparin binding domain-containing peptide sequence
HKHVGIEEPRH

SEQ ID NO: 5978 - protein, 11 aa, Artificial
  IGFBP-2 heparin binding domain-containing peptide sequence
KRHVGIEEPRH

SEQ ID NO: 5979 - protein, 11 aa, Artificial
  IGFBP-2 heparin binding domain-containing peptide sequence
RRHVGIEEPRH

SEQ ID NO: 5980 - protein, 11 aa, Artificial
  IGFBP-2 heparin binding domain-containing peptide sequence
HRHVGIEEPRH

SEQ ID NO: 5981 - protein, 11 aa, Artificial
  IGFBP-2 heparin binding domain-containing peptide sequence
KHKVGIEEPRH

SEQ ID NO: 5982 - protein, 11 aa, Artificial
  IGFBP-2 heparin binding domain-containing peptide sequence
RHKVGIEEPRH

SEQ ID NO: 5983 - protein, 11 aa, Artificial
  IGFBP-2 heparin binding domain-containing peptide sequence
HHKVGIEEPRH

SEQ ID NO: 5984 - protein, 11 aa, Artificial
  IGFBP-2 heparin binding domain-containing peptide sequence
KKKVGIEEPRH

SEQ ID NO: 5985 - protein, 11 aa, Artificial
  IGFBP-2 heparin binding domain-containing peptide sequence
RKKVGIEEPRH

SEQ ID NO: 5986 - protein, 11 aa, Artificial
  IGFBP-2 heparin binding domain-containing peptide sequence
HKKVGIEEPRH

SEQ ID NO: 5987 - protein, 11 aa, Artificial
  IGFBP-2 heparin binding domain-containing peptide sequence
KRKVGIEEPRH

SEQ ID NO: 5988 - protein, 11 aa, Artificial
  IGFBP-2 heparin binding domain-containing peptide sequence
RRKVGIEEPRH

SEQ ID NO: 5989 - protein, 11 aa, Artificial
  IGFBP-2 heparin binding domain-containing peptide sequence
HRKVGIEEPRH

SEQ ID NO: 5990 - protein, 11 aa, Artificial
  IGFBP-2 heparin binding domain-containing peptide sequence
KHRVGIEEPRH

SEQ ID NO: 5991 - protein, 11 aa, Artificial
  IGFBP-2 heparin binding domain-containing peptide sequence
RHRVGIEEPRH

SEQ ID NO: 5992 - protein, 11 aa, Artificial
  IGFBP-2 heparin binding domain-containing peptide sequence
HHRVGIEEPRH

SEQ ID NO: 5993 - protein, 11 aa, Artificial
  IGFBP-2 heparin binding domain-containing peptide sequence
KKRVGIEEPRH

SEQ ID NO: 5994 - protein, 11 aa, Artificial
  IGFBP-2 heparin binding domain-containing peptide sequence
RKRVGIEEPRH

SEQ ID NO: 5995 - protein, 11 aa, Artificial
  IGFBP-2 heparin binding domain-containing peptide sequence
HKRVGIEEPRH

SEQ ID NO: 5996 - protein, 11 aa, Artificial
  IGFBP-2 heparin binding domain-containing peptide sequence
KRRVGIEEPRH

SEQ ID NO: 5997 - protein, 11 aa, Artificial
  IGFBP-2 heparin binding domain-containing peptide sequence
RRRVGIEEPRH

SEQ ID NO: 5998 - protein, 11 aa, Artificial
  IGFBP-2 heparin binding domain-containing peptide sequence
HRRVGIEEPRH

SEQ ID NO: 5999 - protein, 11 aa, Artificial
  IGFBP-2 heparin binding domain-containing peptide sequence
KHHLGVEEPRH

SEQ ID NO: 6000 - protein, 11 aa, Artificial
  IGFBP-2 heparin binding domain-containing peptide sequence
RHHLGVEEPRH

SEQ ID NO: 6001 - protein, 11 aa, Artificial
  IGFBP-2 heparin binding domain-containing peptide sequence
HHHLGVEEPRH

SEQ ID NO: 6002 - protein, 11 aa, Artificial
  IGFBP-2 heparin binding domain-containing peptide sequence
KKHLGVEEPRH

SEQ ID NO: 6003 - protein, 11 aa, Artificial
  IGFBP-2 heparin binding domain-containing peptide sequence
RKHLGVEEPRH

SEQ ID NO: 6004 - protein, 11 aa, Artificial
  IGFBP-2 heparin binding domain-containing peptide sequence
HKHLGVEEPRH

SEQ ID NO: 6005 - protein, 11 aa, Artificial
  IGFBP-2 heparin binding domain-containing peptide sequence
KRHLGVEEPRH

SEQ ID NO: 6006 - protein, 11 aa, Artificial
  IGFBP-2 heparin binding domain-containing peptide sequence
RRHLGVEEPRH

SEQ ID NO: 6007 - protein, 11 aa, Artificial
  IGFBP-2 heparin binding domain-containing peptide sequence
HRHLGVEEPRH

SEQ ID NO: 6008 - protein, 11 aa, Artificial
  IGFBP-2 heparin binding domain-containing peptide sequence
KHKLGVEEPRH

SEQ ID NO: 6009 - protein, 11 aa, Artificial
  IGFBP-2 heparin binding domain-containing peptide sequence
RHKLGVEEPRH

SEQ ID NO: 6010 - protein, 11 aa, Artificial
  IGFBP-2 heparin binding domain-containing peptide sequence
HHKLGVEEPRH

SEQ ID NO: 6011 - protein, 11 aa, Artificial
  IGFBP-2 heparin binding domain-containing peptide sequence
KKKLGVEEPRH

SEQ ID NO: 6012 - protein, 11 aa, Artificial
  IGFBP-2 heparin binding domain-containing peptide sequence
RKKLGVEEPRH

SEQ ID NO: 6013 - protein, 11 aa, Artificial
  IGFBP-2 heparin binding domain-containing peptide sequence
HKKLGVEEPRH

SEQ ID NO: 6014 - protein, 11 aa, Artificial
  IGFBP-2 heparin binding domain-containing peptide sequence
KRKLGVEEPRH

SEQ ID NO: 6015 - protein, 11 aa, Artificial
  IGFBP-2 heparin binding domain-containing peptide sequence
RRKLGVEEPRH

SEQ ID NO: 6016 - protein, 11 aa, Artificial
  IGFBP-2 heparin binding domain-containing peptide sequence
HRKLGVEEPRH

SEQ ID NO: 6017 - protein, 11 aa, Artificial
  IGFBP-2 heparin binding domain-containing peptide sequence
KHRLGVEEPRH

SEQ ID NO: 6018 - protein, 11 aa, Artificial
  IGFBP-2 heparin binding domain-containing peptide sequence
RHRLGVEEPRH

SEQ ID NO: 6019 - protein, 11 aa, Artificial
  IGFBP-2 heparin binding domain-containing peptide sequence
HHRLGVEEPRH

SEQ ID NO: 6020 - protein, 11 aa, Artificial
  IGFBP-2 heparin binding domain-containing peptide sequence
KKRLGVEEPRH

SEQ ID NO: 6021 - protein, 11 aa, Artificial
  IGFBP-2 heparin binding domain-containing peptide sequence
RKRLGVEEPRH

SEQ ID NO: 6022 - protein, 11 aa, Artificial
  IGFBP-2 heparin binding domain-containing peptide sequence
HKRLGVEEPRH

SEQ ID NO: 6023 - protein, 11 aa, Artificial
  IGFBP-2 heparin binding domain-containing peptide sequence
KRRLGVEEPRH

SEQ ID NO: 6024 - protein, 11 aa, Artificial
  IGFBP-2 heparin binding domain-containing peptide sequence
RRRLGVEEPRH

SEQ ID NO: 6025 - protein, 11 aa, Artificial
  IGFBP-2 heparin binding domain-containing peptide sequence
HRRLGVEEPRH

SEQ ID NO: 6026 - protein, 11 aa, Artificial
  IGFBP-2 heparin binding domain-containing peptide sequence
KHHIGVEEPRH

SEQ ID NO: 6027 - protein, 11 aa, Artificial
  IGFBP-2 heparin binding domain-containing peptide sequence
RHHIGVEEPRH

SEQ ID NO: 6028 - protein, 11 aa, Artificial
  IGFBP-2 heparin binding domain-containing peptide sequence
HHHIGVEEPRH

SEQ ID NO: 6029 - protein, 11 aa, Artificial
  IGFBP-2 heparin binding domain-containing peptide sequence
KKHIGVEEPRH

SEQ ID NO: 6030 - protein, 11 aa, Artificial
  IGFBP-2 heparin binding domain-containing peptide sequence
RKHIGVEEPRH

SEQ ID NO: 6031 - protein, 11 aa, Artificial
  IGFBP-2 heparin binding domain-containing peptide sequence
HKHIGVEEPRH

SEQ ID NO: 6032 - protein, 11 aa, Artificial
  IGFBP-2 heparin binding domain-containing peptide sequence
KRHIGVEEPRH

SEQ ID NO: 6033 - protein, 11 aa, Artificial
  IGFBP-2 heparin binding domain-containing peptide sequence
RRHIGVEEPRH

SEQ ID NO: 6034 - protein, 11 aa, Artificial
  IGFBP-2 heparin binding domain-containing peptide sequence
HRHIGVEEPRH

SEQ ID NO: 6035 - protein, 11 aa, Artificial
  IGFBP-2 heparin binding domain-containing peptide sequence
KHKIGVEEPRH

SEQ ID NO: 6036 - protein, 11 aa, Artificial
  IGFBP-2 heparin binding domain-containing peptide sequence
RHKIGVEEPRH

SEQ ID NO: 6037 - protein, 11 aa, Artificial
  IGFBP-2 heparin binding domain-containing peptide sequence
HHKIGVEEPRH

SEQ ID NO: 6038 - protein, 11 aa, Artificial
  IGFBP-2 heparin binding domain-containing peptide sequence
KKKIGVEEPRH

SEQ ID NO: 6039 - protein, 11 aa, Artificial
  IGFBP-2 heparin binding domain-containing peptide sequence
RKKIGVEEPRH

SEQ ID NO: 6040 - protein, 11 aa, Artificial
  IGFBP-2 heparin binding domain-containing peptide sequence
HKKIGVEEPRH

SEQ ID NO: 6041 - protein, 11 aa, Artificial
  IGFBP-2 heparin binding domain-containing peptide sequence
KRKIGVEEPRH

SEQ ID NO: 6042 - protein, 11 aa, Artificial
  IGFBP-2 heparin binding domain-containing peptide sequence
RRKIGVEEPRH

SEQ ID NO: 6043 - protein, 11 aa, Artificial
  IGFBP-2 heparin binding domain-containing peptide sequence
HRKIGVEEPRH

SEQ ID NO: 6044 - protein, 11 aa, Artificial
  IGFBP-2 heparin binding domain-containing peptide sequence
KHRIGVEEPRH

SEQ ID NO: 6045 - protein, 11 aa, Artificial
  IGFBP-2 heparin binding domain-containing peptide sequence
RHRIGVEEPRH

SEQ ID NO: 6046 - protein, 11 aa, Artificial
  IGFBP-2 heparin binding domain-containing peptide sequence
HHRIGVEEPRH

SEQ ID NO: 6047 - protein, 11 aa, Artificial
  IGFBP-2 heparin binding domain-containing peptide sequence
KKRIGVEEPRH

SEQ ID NO: 6048 - protein, 11 aa, Artificial
  IGFBP-2 heparin binding domain-containing peptide sequence
RKRIGVEEPRH

SEQ ID NO: 6049 - protein, 11 aa, Artificial
  IGFBP-2 heparin binding domain-containing peptide sequence
HKRIGVEEPRH

SEQ ID NO: 6050 - protein, 11 aa, Artificial
  IGFBP-2 heparin binding domain-containing peptide sequence
KRRIGVEEPRH

SEQ ID NO: 6051 - protein, 11 aa, Artificial
  IGFBP-2 heparin binding domain-containing peptide sequence
RRRIGVEEPRH

SEQ ID NO: 6052 - protein, 11 aa, Artificial
  IGFBP-2 heparin binding domain-containing peptide sequence
HRRIGVEEPRH

SEQ ID NO: 6053 - protein, 11 aa, Artificial
  IGFBP-2 heparin binding domain-containing peptide sequence
KHHVGVEEPRH

SEQ ID NO: 6054 - protein, 11 aa, Artificial
  IGFBP-2 heparin binding domain-containing peptide sequence
RHHVGVEEPRH

SEQ ID NO: 6055 - protein, 11 aa, Artificial
  IGFBP-2 heparin binding domain-containing peptide sequence
HHHVGVEEPRH

SEQ ID NO: 6056 - protein, 11 aa, Artificial
  IGFBP-2 heparin binding domain-containing peptide sequence
KKHVGVEEPRH

SEQ ID NO: 6057 - protein, 11 aa, Artificial
  IGFBP-2 heparin binding domain-containing peptide sequence
RKHVGVEEPRH

SEQ ID NO: 6058 - protein, 11 aa, Artificial
  IGFBP-2 heparin binding domain-containing peptide sequence
HKHVGVEEPRH

SEQ ID NO: 6059 - protein, 11 aa, Artificial
  IGFBP-2 heparin binding domain-containing peptide sequence
KRHVGVEEPRH

SEQ ID NO: 6060 - protein, 11 aa, Artificial
  IGFBP-2 heparin binding domain-containing peptide sequence
RRHVGVEEPRH

SEQ ID NO: 6061 - protein, 11 aa, Artificial
  IGFBP-2 heparin binding domain-containing peptide sequence
HRHVGVEEPRH

SEQ ID NO: 6062 - protein, 11 aa, Artificial
  IGFBP-2 heparin binding domain-containing peptide sequence
KHKVGVEEPRH

SEQ ID NO: 6063 - protein, 11 aa, Artificial
  IGFBP-2 heparin binding domain-containing peptide sequence
RHKVGVEEPRH

SEQ ID NO: 6064 - protein, 11 aa, Artificial
  IGFBP-2 heparin binding domain-containing peptide sequence
HHKVGVEEPRH

SEQ ID NO: 6065 - protein, 11 aa, Artificial
  IGFBP-2 heparin binding domain-containing peptide sequence
KKKVGVEEPRH

SEQ ID NO: 6066 - protein, 11 aa, Artificial
  IGFBP-2 heparin binding domain-containing peptide sequence
RKKVGVEEPRH

SEQ ID NO: 6067 - protein, 11 aa, Artificial
  IGFBP-2 heparin binding domain-containing peptide sequence
HKKVGVEEPRH

SEQ ID NO: 6068 - protein, 11 aa, Artificial
  IGFBP-2 heparin binding domain-containing peptide sequence
KRKVGVEEPRH

SEQ ID NO: 6069 - protein, 11 aa, Artificial
  IGFBP-2 heparin binding domain-containing peptide sequence
RRKVGVEEPRH

SEQ ID NO: 6070 - protein, 11 aa, Artificial
  IGFBP-2 heparin binding domain-containing peptide sequence
HRKVGVEEPRH

SEQ ID NO: 6071 - protein, 11 aa, Artificial
  IGFBP-2 heparin binding domain-containing peptide sequence
KHRVGVEEPRH

SEQ ID NO: 6072 - protein, 11 aa, Artificial
  IGFBP-2 heparin binding domain-containing peptide sequence
RHRVGVEEPRH

SEQ ID NO: 6073 - protein, 11 aa, Artificial
  IGFBP-2 heparin binding domain-containing peptide sequence
HHRVGVEEPRH

SEQ ID NO: 6074 - protein, 11 aa, Artificial
  IGFBP-2 heparin binding domain-containing peptide sequence
KKRVGVEEPRH

SEQ ID NO: 6075 - protein, 11 aa, Artificial
  IGFBP-2 heparin binding domain-containing peptide sequence
RKRVGVEEPRH

SEQ ID NO: 6076 - protein, 11 aa, Artificial
  IGFBP-2 heparin binding domain-containing peptide sequence
HKRVGVEEPRH

SEQ ID NO: 6077 - protein, 11 aa, Artificial
  IGFBP-2 heparin binding domain-containing peptide sequence
KRRVGVEEPRH

SEQ ID NO: 6078 - protein, 11 aa, Artificial
  IGFBP-2 heparin binding domain-containing peptide sequence
RRRVGVEEPRH

SEQ ID NO: 6079 - protein, 11 aa, Artificial
  IGFBP-2 heparin binding domain-containing peptide sequence
HRRVGVEEPRH

SEQ ID NO: 6080 - protein, 11 aa, Artificial
  IGFBP-2 heparin binding domain-containing peptide sequence
KHHLGLNEPRH

SEQ ID NO: 6081 - protein, 11 aa, Artificial
  IGFBP-2 heparin binding domain-containing peptide sequence
RHHLGLNEPRH

SEQ ID NO: 6082 - protein, 11 aa, Artificial
  IGFBP-2 heparin binding domain-containing peptide sequence
HHHLGLNEPRH

SEQ ID NO: 6083 - protein, 11 aa, Artificial
  IGFBP-2 heparin binding domain-containing peptide sequence
KKHLGLNEPRH

SEQ ID NO: 6084 - protein, 11 aa, Artificial
  IGFBP-2 heparin binding domain-containing peptide sequence
RKHLGLNEPRH

SEQ ID NO: 6085 - protein, 11 aa, Artificial
  IGFBP-2 heparin binding domain-containing peptide sequence
HKHLGLNEPRH

SEQ ID NO: 6086 - protein, 11 aa, Artificial
  IGFBP-2 heparin binding domain-containing peptide sequence
KRHLGLNEPRH

SEQ ID NO: 6087 - protein, 11 aa, Artificial
  IGFBP-2 heparin binding domain-containing peptide sequence
RRHLGLNEPRH

SEQ ID NO: 6088 - protein, 11 aa, Artificial
  IGFBP-2 heparin binding domain-containing peptide sequence
HRHLGLNEPRH

SEQ ID NO: 6089 - protein, 11 aa, Artificial
  IGFBP-2 heparin binding domain-containing peptide sequence
KHKLGLNEPRH

SEQ ID NO: 6090 - protein, 11 aa, Artificial
  IGFBP-2 heparin binding domain-containing peptide sequence
RHKLGLNEPRH

SEQ ID NO: 6091 - protein, 11 aa, Artificial
  IGFBP-2 heparin binding domain-containing peptide sequence
HHKLGLNEPRH

SEQ ID NO: 6092 - protein, 11 aa, Artificial
  IGFBP-2 heparin binding domain-containing peptide sequence
KKKLGLNEPRH

SEQ ID NO: 6093 - protein, 11 aa, Artificial
  IGFBP-2 heparin binding domain-containing peptide sequence
RKKLGLNEPRH

SEQ ID NO: 6094 - protein, 11 aa, Artificial
  IGFBP-2 heparin binding domain-containing peptide sequence
HKKLGLNEPRH

SEQ ID NO: 6095 - protein, 11 aa, Artificial
  IGFBP-2 heparin binding domain-containing peptide sequence
KRKLGLNEPRH

SEQ ID NO: 6096 - protein, 11 aa, Artificial
  IGFBP-2 heparin binding domain-containing peptide sequence
RRKLGLNEPRH

SEQ ID NO: 6097 - protein, 11 aa, Artificial
  IGFBP-2 heparin binding domain-containing peptide sequence
HRKLGLNEPRH

SEQ ID NO: 6098 - protein, 11 aa, Artificial
  IGFBP-2 heparin binding domain-containing peptide sequence
KHRLGLNEPRH

SEQ ID NO: 6099 - protein, 11 aa, Artificial
  IGFBP-2 heparin binding domain-containing peptide sequence
RHRLGLNEPRH

SEQ ID NO: 6100 - protein, 11 aa, Artificial
  IGFBP-2 heparin binding domain-containing peptide sequence
HHRLGLNEPRH

SEQ ID NO: 6101 - protein, 11 aa, Artificial
  IGFBP-2 heparin binding domain-containing peptide sequence
KKRLGLNEPRH

SEQ ID NO: 6102 - protein, 11 aa, Artificial
  IGFBP-2 heparin binding domain-containing peptide sequence
RKRLGLNEPRH

SEQ ID NO: 6103 - protein, 11 aa, Artificial
  IGFBP-2 heparin binding domain-containing peptide sequence
HKRLGLNEPRH

SEQ ID NO: 6104 - protein, 11 aa, Artificial
  IGFBP-2 heparin binding domain-containing peptide sequence
KRRLGLNEPRH

SEQ ID NO: 6105 - protein, 11 aa, Artificial
  IGFBP-2 heparin binding domain-containing peptide sequence
RRRLGLNEPRH

SEQ ID NO: 6106 - protein, 11 aa, Artificial
  IGFBP-2 heparin binding domain-containing peptide sequence
HRRLGLNEPRH

SEQ ID NO: 6107 - protein, 10 aa, Artificial
  IGFBP-2 heparin binding domain-containing peptide sequence
KHHIGLNPRH

SEQ ID NO: 6108 - protein, 11 aa, Artificial
  IGFBP-2 heparin binding domain-containing peptide sequence
RHHIGLNEPRH

SEQ ID NO: 6109 - protein, 11 aa, Artificial
  IGFBP-2 heparin binding domain-containing peptide sequence
HHHIGLNEPRH

SEQ ID NO: 6110 - protein, 11 aa, Artificial
  IGFBP-2 heparin binding domain-containing peptide sequence
KKHIGLNEPRH

SEQ ID NO: 6111 - protein, 11 aa, Artificial
  IGFBP-2 heparin binding domain-containing peptide sequence
RKHIGLNEPRH

SEQ ID NO: 6112 - protein, 11 aa, Artificial
  IGFBP-2 heparin binding domain-containing peptide sequence
HKHIGLNEPRH

SEQ ID NO: 6113 - protein, 11 aa, Artificial
  IGFBP-2 heparin binding domain-containing peptide sequence
KRHIGLNEPRH

SEQ ID NO: 6114 - protein, 11 aa, Artificial
  IGFBP-2 heparin binding domain-containing peptide sequence
RRHIGLNEPRH

SEQ ID NO: 6115 - protein, 11 aa, Artificial
  IGFBP-2 heparin binding domain-containing peptide sequence
HRHIGLNEPRH

SEQ ID NO: 6116 - protein, 11 aa, Artificial
  IGFBP-2 heparin binding domain-containing peptide sequence
KHKIGLNEPRH

SEQ ID NO: 6117 - protein, 11 aa, Artificial
  IGFBP-2 heparin binding domain-containing peptide sequence
RHKIGLNEPRH

SEQ ID NO: 6118 - protein, 11 aa, Artificial
  IGFBP-2 heparin binding domain-containing peptide sequence
HHKIGLNEPRH

SEQ ID NO: 6119 - protein, 11 aa, Artificial
  IGFBP-2 heparin binding domain-containing peptide sequence
KKKIGLNEPRH

SEQ ID NO: 6120 - protein, 11 aa, Artificial
  IGFBP-2 heparin binding domain-containing peptide sequence
RKKIGLNEPRH

SEQ ID NO: 6121 - protein, 11 aa, Artificial
  IGFBP-2 heparin binding domain-containing peptide sequence
HKKIGLNEPRH

SEQ ID NO: 6122 - protein, 11 aa, Artificial
  IGFBP-2 heparin binding domain-containing peptide sequence
KRKIGLNEPRH

SEQ ID NO: 6123 - protein, 11 aa, Artificial
  IGFBP-2 heparin binding domain-containing peptide sequence
RRKIGLNEPRH

SEQ ID NO: 6124 - protein, 11 aa, Artificial
  IGFBP-2 heparin binding domain-containing peptide sequence
HRKIGLNEPRH

SEQ ID NO: 6125 - protein, 11 aa, Artificial
  IGFBP-2 heparin binding domain-containing peptide sequence
KHRIGLNEPRH

SEQ ID NO: 6126 - protein, 11 aa, Artificial
  IGFBP-2 heparin binding domain-containing peptide sequence
RHRIGLNEPRH

SEQ ID NO: 6127 - protein, 11 aa, Artificial
  IGFBP-2 heparin binding domain-containing peptide sequence
HHRIGLNEPRH

SEQ ID NO: 6128 - protein, 11 aa, Artificial
  IGFBP-2 heparin binding domain-containing peptide sequence
KKRIGLNEPRH

SEQ ID NO: 6129 - protein, 11 aa, Artificial
  IGFBP-2 heparin binding domain-containing peptide sequence
RKRIGLNEPRH

SEQ ID NO: 6130 - protein, 11 aa, Artificial
  IGFBP-2 heparin binding domain-containing peptide sequence
HKRIGLNEPRH

SEQ ID NO: 6131 - protein, 11 aa, Artificial
  IGFBP-2 heparin binding domain-containing peptide sequence
KRRIGLNEPRH

SEQ ID NO: 6132 - protein, 11 aa, Artificial
  IGFBP-2 heparin binding domain-containing peptide sequence
RRRIGLNEPRH

SEQ ID NO: 6133 - protein, 11 aa, Artificial
  IGFBP-2 heparin binding domain-containing peptide sequence
HRRIGLNEPRH

SEQ ID NO: 6134 - protein, 11 aa, Artificial
  IGFBP-2 heparin binding domain-containing peptide sequence
KHHVGLNEPRH

SEQ ID NO: 6135 - protein, 11 aa, Artificial
  IGFBP-2 heparin binding domain-containing peptide sequence
RHHVGLNEPRH

SEQ ID NO: 6136 - protein, 11 aa, Artificial
  IGFBP-2 heparin binding domain-containing peptide sequence
HHHVGLNEPRH

SEQ ID NO: 6137 - protein, 11 aa, Artificial
  IGFBP-2 heparin binding domain-containing peptide sequence
KKHVGLNEPRH

SEQ ID NO: 6138 - protein, 11 aa, Artificial
  IGFBP-2 heparin binding domain-containing peptide sequence
RKHVGLNEPRH

SEQ ID NO: 6139 - protein, 11 aa, Artificial
  IGFBP-2 heparin binding domain-containing peptide sequence
HKHVGLNEPRH

SEQ ID NO: 6140 - protein, 11 aa, Artificial
  IGFBP-2 heparin binding domain-containing peptide sequence
KRHVGLNEPRH

SEQ ID NO: 6141 - protein, 11 aa, Artificial
  IGFBP-2 heparin binding domain-containing peptide sequence
RRHVGLNEPRH

SEQ ID NO: 6142 - protein, 11 aa, Artificial
  IGFBP-2 heparin binding domain-containing peptide sequence
HRHVGLNEPRH

SEQ ID NO: 6143 - protein, 11 aa, Artificial
  IGFBP-2 heparin binding domain-containing peptide sequence
KHKVGLNEPRH

SEQ ID NO: 6144 - protein, 11 aa, Artificial
  IGFBP-2 heparin binding domain-containing peptide sequence
RHKVGLNEPRH

SEQ ID NO: 6145 - protein, 11 aa, Artificial
  IGFBP-2 heparin binding domain-containing peptide sequence
HHKVGLNEPRH

SEQ ID NO: 6146 - protein, 11 aa, Artificial
  IGFBP-2 heparin binding domain-containing peptide sequence
KKKVGLNEPRH

SEQ ID NO: 6147 - protein, 11 aa, Artificial
  IGFBP-2 heparin binding domain-containing peptide sequence
RKKVGLNEPRH

SEQ ID NO: 6148 - protein, 11 aa, Artificial
  IGFBP-2 heparin binding domain-containing peptide sequence
HKKVGLNEPRH

SEQ ID NO: 6149 - protein, 11 aa, Artificial
  IGFBP-2 heparin binding domain-containing peptide sequence
KRKVGLNEPRH

SEQ ID NO: 6150 - protein, 11 aa, Artificial
  IGFBP-2 heparin binding domain-containing peptide sequence
RRKVGLNEPRH

SEQ ID NO: 6151 - protein, 11 aa, Artificial
  IGFBP-2 heparin binding domain-containing peptide sequence
HRKVGLNEPRH

SEQ ID NO: 6152 - protein, 11 aa, Artificial
  IGFBP-2 heparin binding domain-containing peptide sequence
KHRVGLNEPRH

SEQ ID NO: 6153 - protein, 11 aa, Artificial
  IGFBP-2 heparin binding domain-containing peptide sequence
RHRVGLNEPRH

SEQ ID NO: 6154 - protein, 11 aa, Artificial
  IGFBP-2 heparin binding domain-containing peptide sequence
HHRVGLNEPRH

SEQ ID NO: 6155 - protein, 11 aa, Artificial
  IGFBP-2 heparin binding domain-containing peptide sequence
KKRVGLNEPRH

SEQ ID NO: 6156 - protein, 11 aa, Artificial
  IGFBP-2 heparin binding domain-containing peptide sequence
RKRVGLNEPRH

SEQ ID NO: 6157 - protein, 11 aa, Artificial
  IGFBP-2 heparin binding domain-containing peptide sequence
HKRVGLNEPRH

SEQ ID NO: 6158 - protein, 11 aa, Artificial
  IGFBP-2 heparin binding domain-containing peptide sequence
KRRVGLNEPRH

SEQ ID NO: 6159 - protein, 11 aa, Artificial
  IGFBP-2 heparin binding domain-containing peptide sequence
RRRVGLNEPRH

SEQ ID NO: 6160 - protein, 11 aa, Artificial
  IGFBP-2 heparin binding domain-containing peptide sequence
HRRVGLNEPRH

SEQ ID NO: 6161 - protein, 11 aa, Artificial
  IGFBP-2 heparin binding domain-containing peptide sequence
KHHLGINEPRH

SEQ ID NO: 6162 - protein, 11 aa, Artificial
  IGFBP-2 heparin binding domain-containing peptide sequence
RHHLGINEPRH

SEQ ID NO: 6163 - protein, 11 aa, Artificial
  IGFBP-2 heparin binding domain-containing peptide sequence
HHHLGINEPRH

SEQ ID NO: 6164 - protein, 11 aa, Artificial
  IGFBP-2 heparin binding domain-containing peptide sequence
KKHLGINEPRH

SEQ ID NO: 6165 - protein, 11 aa, Artificial
  IGFBP-2 heparin binding domain-containing peptide sequence
RKHLGINEPRH

SEQ ID NO: 6166 - protein, 11 aa, Artificial
  IGFBP-2 heparin binding domain-containing peptide sequence
HKHLGINEPRH

SEQ ID NO: 6167 - protein, 11 aa, Artificial
  IGFBP-2 heparin binding domain-containing peptide sequence
KRHLGINEPRH

SEQ ID NO: 6168 - protein, 11 aa, Artificial
  IGFBP-2 heparin binding domain-containing peptide sequence
RRHLGINEPRH

SEQ ID NO: 6169 - protein, 11 aa, Artificial
  IGFBP-2 heparin binding domain-containing peptide sequence
HRHLGINEPRH

SEQ ID NO: 6170 - protein, 11 aa, Artificial
  IGFBP-2 heparin binding domain-containing peptide sequence
KHKLGINEPRH

SEQ ID NO: 6171 - protein, 11 aa, Artificial
  IGFBP-2 heparin binding domain-containing peptide sequence
RHKLGINEPRH

SEQ ID NO: 6172 - protein, 11 aa, Artificial
  IGFBP-2 heparin binding domain-containing peptide sequence
HHKLGINEPRH

SEQ ID NO: 6173 - protein, 11 aa, Artificial
  IGFBP-2 heparin binding domain-containing peptide sequence
KKKLGINEPRH

SEQ ID NO: 6174 - protein, 11 aa, Artificial
  IGFBP-2 heparin binding domain-containing peptide sequence
RKKLGINEPRH

SEQ ID NO: 6175 - protein, 11 aa, Artificial
  IGFBP-2 heparin binding domain-containing peptide sequence
HKKLGINEPRH

SEQ ID NO: 6176 - protein, 11 aa, Artificial
  IGFBP-2 heparin binding domain-containing peptide sequence
KRKLGINEPRH

SEQ ID NO: 6177 - protein, 11 aa, Artificial
  IGFBP-2 heparin binding domain-containing peptide sequence
RRKLGINEPRH

SEQ ID NO: 6178 - protein, 11 aa, Artificial
  IGFBP-2 heparin binding domain-containing peptide sequence
HRKLGINEPRH

SEQ ID NO: 6179 - protein, 11 aa, Artificial
  IGFBP-2 heparin binding domain-containing peptide sequence
KHRLGINEPRH

SEQ ID NO: 6180 - protein, 11 aa, Artificial
  IGFBP-2 heparin binding domain-containing peptide sequence
RHRLGINEPRH

SEQ ID NO: 6181 - protein, 11 aa, Artificial
  IGFBP-2 heparin binding domain-containing peptide sequence
HHRLGINEPRH

SEQ ID NO: 6182 - protein, 11 aa, Artificial
  IGFBP-2 heparin binding domain-containing peptide sequence
KKRLGINEPRH

SEQ ID NO: 6183 - protein, 11 aa, Artificial
  IGFBP-2 heparin binding domain-containing peptide sequence
RKRLGINEPRH

SEQ ID NO: 6184 - protein, 11 aa, Artificial
  IGFBP-2 heparin binding domain-containing peptide sequence
HKRLGINEPRH

SEQ ID NO: 6185 - protein, 11 aa, Artificial
  IGFBP-2 heparin binding domain-containing peptide sequence
KRRLGINEPRH

SEQ ID NO: 6186 - protein, 11 aa, Artificial
  IGFBP-2 heparin binding domain-containing peptide sequence
RRRLGINEPRH

SEQ ID NO: 6187 - protein, 11 aa, Artificial
  IGFBP-2 heparin binding domain-containing peptide sequence
HRRLGINEPRH

SEQ ID NO: 6188 - protein, 11 aa, Artificial
  IGFBP-2 heparin binding domain-containing peptide sequence
KHHIGIENPRH

SEQ ID NO: 6189 - protein, 11 aa, Artificial
  IGFBP-2 heparin binding domain-containing peptide sequence
RHHIGINEPRH

SEQ ID NO: 6190 - protein, 11 aa, Artificial
  IGFBP-2 heparin binding domain-containing peptide sequence
HHHIGINEPRH

SEQ ID NO: 6191 - protein, 11 aa, Artificial
  IGFBP-2 heparin binding domain-containing peptide sequence
KKHIGINEPRH

SEQ ID NO: 6192 - protein, 11 aa, Artificial
  IGFBP-2 heparin binding domain-containing peptide sequence
RKHIGINEPRH

SEQ ID NO: 6193 - protein, 11 aa, Artificial
  IGFBP-2 heparin binding domain-containing peptide sequence
HKHIGINEPRH

SEQ ID NO: 6194 - protein, 11 aa, Artificial
  IGFBP-2 heparin binding domain-containing peptide sequence
KRHIGINEPRH

SEQ ID NO: 6195 - protein, 11 aa, Artificial
  IGFBP-2 heparin binding domain-containing peptide sequence
RRHIGINEPRH

SEQ ID NO: 6196 - protein, 11 aa, Artificial
  IGFBP-2 heparin binding domain-containing peptide sequence
HRHIGINEPRH

SEQ ID NO: 6197 - protein, 11 aa, Artificial
  IGFBP-2 heparin binding domain-containing peptide sequence
KHKIGINEPRH

SEQ ID NO: 6198 - protein, 11 aa, Artificial
  IGFBP-2 heparin binding domain-containing peptide sequence
RHKIGINEPRH

SEQ ID NO: 6199 - protein, 11 aa, Artificial
  IGFBP-2 heparin binding domain-containing peptide sequence
HHKIGINEPRH

SEQ ID NO: 6200 - protein, 11 aa, Artificial
  IGFBP-2 heparin binding domain-containing peptide sequence
KKKIGINEPRH

SEQ ID NO: 6201 - protein, 11 aa, Artificial
  IGFBP-2 heparin binding domain-containing peptide sequence
RKKIGINEPRH

SEQ ID NO: 6202 - protein, 11 aa, Artificial
  IGFBP-2 heparin binding domain-containing peptide sequence
HKKIGINEPRH

SEQ ID NO: 6203 - protein, 11 aa, Artificial
  IGFBP-2 heparin binding domain-containing peptide sequence
KRKIGINEPRH

SEQ ID NO: 6204 - protein, 11 aa, Artificial
  IGFBP-2 heparin binding domain-containing peptide sequence
RRKIGINEPRH

SEQ ID NO: 6205 - protein, 11 aa, Artificial
  IGFBP-2 heparin binding domain-containing peptide sequence
HRKIGINEPRH

SEQ ID NO: 6206 - protein, 11 aa, Artificial
  IGFBP-2 heparin binding domain-containing peptide sequence
KHRIGINEPRH

SEQ ID NO: 6207 - protein, 11 aa, Artificial
  IGFBP-2 heparin binding domain-containing peptide sequence
RHRIGINEPRH

SEQ ID NO: 6208 - protein, 11 aa, Artificial
  IGFBP-2 heparin binding domain-containing peptide sequence
HHRIGINEPRH

SEQ ID NO: 6209 - protein, 11 aa, Artificial
  IGFBP-2 heparin binding domain-containing peptide sequence
KKRIGINEPRH

SEQ ID NO: 6210 - protein, 11 aa, Artificial
  IGFBP-2 heparin binding domain-containing peptide sequence
RKRIGINEPRH

SEQ ID NO: 6211 - protein, 11 aa, Artificial
  IGFBP-2 heparin binding domain-containing peptide sequence
HKRIGINEPRH

SEQ ID NO: 6212 - protein, 11 aa, Artificial
  IGFBP-2 heparin binding domain-containing peptide sequence
KRRIGINEPRH

SEQ ID NO: 6213 - protein, 11 aa, Artificial
  IGFBP-2 heparin binding domain-containing peptide sequence
RRRIGINEPRH

SEQ ID NO: 6214 - protein, 11 aa, Artificial
  IGFBP-2 heparin binding domain-containing peptide sequence
HRRIGINEPRH

SEQ ID NO: 6215 - protein, 11 aa, Artificial
  IGFBP-2 heparin binding domain-containing peptide sequence
KHHVGINEPRH

SEQ ID NO: 6216 - protein, 11 aa, Artificial
  IGFBP-2 heparin binding domain-containing peptide sequence
RHHVGINEPRH

SEQ ID NO: 6217 - protein, 11 aa, Artificial
  IGFBP-2 heparin binding domain-containing peptide sequence
HHHVGINEPRH

SEQ ID NO: 6218 - protein, 11 aa, Artificial
  IGFBP-2 heparin binding domain-containing peptide sequence
KKHVGINEPRH

SEQ ID NO: 6219 - protein, 11 aa, Artificial
  IGFBP-2 heparin binding domain-containing peptide sequence
RKHVGINEPRH

SEQ ID NO: 6220 - protein, 11 aa, Artificial
  IGFBP-2 heparin binding domain-containing peptide sequence
HKHVGINEPRH

SEQ ID NO: 6221 - protein, 11 aa, Artificial
  IGFBP-2 heparin binding domain-containing peptide sequence
KRHVGINEPRH

SEQ ID NO: 6222 - protein, 11 aa, Artificial
  IGFBP-2 heparin binding domain-containing peptide sequence
RRHVGINEPRH

SEQ ID NO: 6223 - protein, 11 aa, Artificial
  IGFBP-2 heparin binding domain-containing peptide sequence
HRHVGINEPRH

SEQ ID NO: 6224 - protein, 11 aa, Artificial
  IGFBP-2 heparin binding domain-containing peptide sequence
KHKVGINEPRH

SEQ ID NO: 6225 - protein, 11 aa, Artificial
  IGFBP-2 heparin binding domain-containing peptide sequence
RHKVGINEPRH

SEQ ID NO: 6226 - protein, 11 aa, Artificial
  IGFBP-2 heparin binding domain-containing peptide sequence
HHKVGINEPRH

SEQ ID NO: 6227 - protein, 11 aa, Artificial
  IGFBP-2 heparin binding domain-containing peptide sequence
KKKVGINEPRH

SEQ ID NO: 6228 - protein, 11 aa, Artificial
  IGFBP-2 heparin binding domain-containing peptide sequence
RKKVGINEPRH

SEQ ID NO: 6229 - protein, 11 aa, Artificial
  IGFBP-2 heparin binding domain-containing peptide sequence
HKKVGINEPRH

SEQ ID NO: 6230 - protein, 11 aa, Artificial
  IGFBP-2 heparin binding domain-containing peptide sequence
KRKVGINEPRH

SEQ ID NO: 6231 - protein, 11 aa, Artificial
  IGFBP-2 heparin binding domain-containing peptide sequence
RRKVGINEPRH

SEQ ID NO: 6232 - protein, 11 aa, Artificial
  IGFBP-2 heparin binding domain-containing peptide sequence
HRKVGINEPRH

SEQ ID NO: 6233 - protein, 11 aa, Artificial
  IGFBP-2 heparin binding domain-containing peptide sequence
KHRVGINEPRH

SEQ ID NO: 6234 - protein, 11 aa, Artificial
  IGFBP-2 heparin binding domain-containing peptide sequence
RHRVGINEPRH

SEQ ID NO: 6235 - protein, 11 aa, Artificial
  IGFBP-2 heparin binding domain-containing peptide sequence
HHRVGINEPRH

SEQ ID NO: 6236 - protein, 11 aa, Artificial
  IGFBP-2 heparin binding domain-containing peptide sequence
KKRVGINEPRH

SEQ ID NO: 6237 - protein, 11 aa, Artificial
  IGFBP-2 heparin binding domain-containing peptide sequence
RKRVGINEPRH

SEQ ID NO: 6238 - protein, 11 aa, Artificial
  IGFBP-2 heparin binding domain-containing peptide sequence
HKRVGINEPRH

SEQ ID NO: 6239 - protein, 11 aa, Artificial
  IGFBP-2 heparin binding domain-containing peptide sequence
KRRVGINEPRH

SEQ ID NO: 6240 - protein, 11 aa, Artificial
  IGFBP-2 heparin binding domain-containing peptide sequence
RRRVGINEPRH

SEQ ID NO: 6241 - protein, 11 aa, Artificial
  IGFBP-2 heparin binding domain-containing peptide sequence
HRRVGINEPRH

SEQ ID NO: 6242 - protein, 11 aa, Artificial
  IGFBP-2 heparin binding domain-containing peptide sequence
KHHLGVNEPRH

SEQ ID NO: 6243 - protein, 11 aa, Artificial
  IGFBP-2 heparin binding domain-containing peptide sequence
RHHLGVNEPRH

SEQ ID NO: 6244 - protein, 11 aa, Artificial
  IGFBP-2 heparin binding domain-containing peptide sequence
HHHLGVNEPRH

SEQ ID NO: 6245 - protein, 11 aa, Artificial
  IGFBP-2 heparin binding domain-containing peptide sequence
KKHLGVNEPRH

SEQ ID NO: 6246 - protein, 11 aa, Artificial
  IGFBP-2 heparin binding domain-containing peptide sequence
RKHLGVNEPRH

SEQ ID NO: 6247 - protein, 11 aa, Artificial
  IGFBP-2 heparin binding domain-containing peptide sequence
HKHLGVNEPRH

SEQ ID NO: 6248 - protein, 11 aa, Artificial
  IGFBP-2 heparin binding domain-containing peptide sequence
KRHLGVNEPRH

SEQ ID NO: 6249 - protein, 11 aa, Artificial
  IGFBP-2 heparin binding domain-containing peptide sequence
RRHLGVNEPRH

SEQ ID NO: 6250 - protein, 11 aa, Artificial
  IGFBP-2 heparin binding domain-containing peptide sequence
HRHLGVNEPRH

SEQ ID NO: 6251 - protein, 11 aa, Artificial
  IGFBP-2 heparin binding domain-containing peptide sequence
KHKLGVNEPRH

SEQ ID NO: 6252 - protein, 11 aa, Artificial
  IGFBP-2 heparin binding domain-containing peptide sequence
RHKLGVNEPRH

SEQ ID NO: 6253 - protein, 11 aa, Artificial
  IGFBP-2 heparin binding domain-containing peptide sequence
HHKLGVNEPRH

SEQ ID NO: 6254 - protein, 11 aa, Artificial
  IGFBP-2 heparin binding domain-containing peptide sequence
KKKLGVNEPRH

SEQ ID NO: 6255 - protein, 11 aa, Artificial
  IGFBP-2 heparin binding domain-containing peptide sequence
RKKLGVNEPRH

SEQ ID NO: 6256 - protein, 11 aa, Artificial
  IGFBP-2 heparin binding domain-containing peptide sequence
HKKLGVNEPRH

SEQ ID NO: 6257 - protein, 11 aa, Artificial
  IGFBP-2 heparin binding domain-containing peptide sequence
KRKLGVNEPRH

SEQ ID NO: 6258 - protein, 11 aa, Artificial
  IGFBP-2 heparin binding domain-containing peptide sequence
RRKLGVNEPRH

SEQ ID NO: 6259 - protein, 11 aa, Artificial
  IGFBP-2 heparin binding domain-containing peptide sequence
HRKLGVNEPRH

SEQ ID NO: 6260 - protein, 11 aa, Artificial
  IGFBP-2 heparin binding domain-containing peptide sequence
KHRLGVNEPRH

SEQ ID NO: 6261 - protein, 11 aa, Artificial
  IGFBP-2 heparin binding domain-containing peptide sequence
RHRLGVNEPRH

SEQ ID NO: 6262 - protein, 11 aa, Artificial
  IGFBP-2 heparin binding domain-containing peptide sequence
HHRLGVNEPRH

SEQ ID NO: 6263 - protein, 11 aa, Artificial
  IGFBP-2 heparin binding domain-containing peptide sequence
KKRLGVNEPRH

SEQ ID NO: 6264 - protein, 11 aa, Artificial
  IGFBP-2 heparin binding domain-containing peptide sequence
RKRLGVNEPRH

SEQ ID NO: 6265 - protein, 11 aa, Artificial
  IGFBP-2 heparin binding domain-containing peptide sequence
HKRLGVNEPRH

SEQ ID NO: 6266 - protein, 11 aa, Artificial
  IGFBP-2 heparin binding domain-containing peptide sequence
KRRLGVNEPRH

SEQ ID NO: 6267 - protein, 11 aa, Artificial
  IGFBP-2 heparin binding domain-containing peptide sequence
RRRLGVNEPRH

SEQ ID NO: 6268 - protein, 11 aa, Artificial
  IGFBP-2 heparin binding domain-containing peptide sequence
HRRLGVNEPRH

SEQ ID NO: 6269 - protein, 11 aa, Artificial
  IGFBP-2 heparin binding domain-containing peptide sequence
KHHIGVNEPRH

SEQ ID NO: 6270 - protein, 11 aa, Artificial
  IGFBP-2 heparin binding domain-containing peptide sequence
RHHIGVNEPRH

SEQ ID NO: 6271 - protein, 11 aa, Artificial
  IGFBP-2 heparin binding domain-containing peptide sequence
HHHIGVNEPRH

SEQ ID NO: 6272 - protein, 11 aa, Artificial
  IGFBP-2 heparin binding domain-containing peptide sequence
KKHIGVNEPRH

SEQ ID NO: 6273 - protein, 11 aa, Artificial
  IGFBP-2 heparin binding domain-containing peptide sequence
RKHIGVNEPRH

SEQ ID NO: 6274 - protein, 11 aa, Artificial
  IGFBP-2 heparin binding domain-containing peptide sequence
HKHIGVNEPRH

SEQ ID NO: 6275 - protein, 11 aa, Artificial
  IGFBP-2 heparin binding domain-containing peptide sequence
KRHIGVNEPRH

SEQ ID NO: 6276 - protein, 11 aa, Artificial
  IGFBP-2 heparin binding domain-containing peptide sequence
RRHIGVNEPRH

SEQ ID NO: 6277 - protein, 11 aa, Artificial
  IGFBP-2 heparin binding domain-containing peptide sequence
HRHIGVNEPRH

SEQ ID NO: 6278 - protein, 11 aa, Artificial
  IGFBP-2 heparin binding domain-containing peptide sequence
KHKIGVNEPRH

SEQ ID NO: 6279 - protein, 11 aa, Artificial
  IGFBP-2 heparin binding domain-containing peptide sequence
RHKIGVNEPRH

SEQ ID NO: 6280 - protein, 11 aa, Artificial
  IGFBP-2 heparin binding domain-containing peptide sequence
HHKIGVNEPRH

SEQ ID NO: 6281 - protein, 11 aa, Artificial
  IGFBP-2 heparin binding domain-containing peptide sequence
KKKIGVNEPRH

SEQ ID NO: 6282 - protein, 11 aa, Artificial
  IGFBP-2 heparin binding domain-containing peptide sequence
RKKIGVNEPRH

SEQ ID NO: 6283 - protein, 11 aa, Artificial
  IGFBP-2 heparin binding domain-containing peptide sequence
HKKIGVNEPRH

SEQ ID NO: 6284 - protein, 11 aa, Artificial
  IGFBP-2 heparin binding domain-containing peptide sequence
KRKIGVNEPRH

SEQ ID NO: 6285 - protein, 11 aa, Artificial
  IGFBP-2 heparin binding domain-containing peptide sequence
RRKIGVNEPRH

SEQ ID NO: 6286 - protein, 11 aa, Artificial
  IGFBP-2 heparin binding domain-containing peptide sequence
HRKIGVNEPRH

SEQ ID NO: 6287 - protein, 11 aa, Artificial
  IGFBP-2 heparin binding domain-containing peptide sequence
KHRIGVNEPRH

SEQ ID NO: 6288 - protein, 11 aa, Artificial
  IGFBP-2 heparin binding domain-containing peptide sequence
RHRIGVNEPRH

SEQ ID NO: 6289 - protein, 11 aa, Artificial
  IGFBP-2 heparin binding domain-containing peptide sequence
HHRIGVNEPRH

SEQ ID NO: 6290 - protein, 11 aa, Artificial
  IGFBP-2 heparin binding domain-containing peptide sequence
KKRIGVNEPRH

SEQ ID NO: 6291 - protein, 11 aa, Artificial
  IGFBP-2 heparin binding domain-containing peptide sequence
RKRIGVNEPRH

SEQ ID NO: 6292 - protein, 11 aa, Artificial
  IGFBP-2 heparin binding domain-containing peptide sequence
HKRIGVNEPRH

SEQ ID NO: 6293 - protein, 11 aa, Artificial
  IGFBP-2 heparin binding domain-containing peptide sequence
KRRIGVNEPRH

SEQ ID NO: 6294 - protein, 11 aa, Artificial
  IGFBP-2 heparin binding domain-containing peptide sequence
RRRIGVNEPRH

SEQ ID NO: 6295 - protein, 11 aa, Artificial
  IGFBP-2 heparin binding domain-containing peptide sequence
HRRIGVNEPRH

SEQ ID NO: 6296 - protein, 11 aa, Artificial
  IGFBP-2 heparin binding domain-containing peptide sequence
KHHVGVNEPRH

SEQ ID NO: 6297 - protein, 11 aa, Artificial
  IGFBP-2 heparin binding domain-containing peptide sequence
RHHVGVNEPRH

SEQ ID NO: 6298 - protein, 11 aa, Artificial
  IGFBP-2 heparin binding domain-containing peptide sequence
HHHVGVNEPRH

SEQ ID NO: 6299 - protein, 11 aa, Artificial
  IGFBP-2 heparin binding domain-containing peptide sequence
KKHVGVNEPRH

SEQ ID NO: 6300 - protein, 11 aa, Artificial
  IGFBP-2 heparin binding domain-containing peptide sequence
RKHVGVNEPRH

SEQ ID NO: 6301 - protein, 11 aa, Artificial
  IGFBP-2 heparin binding domain-containing peptide sequence
HKHVGVNEPRH

SEQ ID NO: 6302 - protein, 11 aa, Artificial
  IGFBP-2 heparin binding domain-containing peptide sequence
KRHVGVNEPRH

SEQ ID NO: 6303 - protein, 11 aa, Artificial
  IGFBP-2 heparin binding domain-containing peptide sequence
RRHVGVNEPRH

SEQ ID NO: 6304 - protein, 11 aa, Artificial
  IGFBP-2 heparin binding domain-containing peptide sequence
HRHVGVNEPRH

SEQ ID NO: 6305 - protein, 11 aa, Artificial
  IGFBP-2 heparin binding domain-containing peptide sequence
KHKVGVNEPRH

SEQ ID NO: 6306 - protein, 11 aa, Artificial
  IGFBP-2 heparin binding domain-containing peptide sequence
RHKVGVNEPRH

SEQ ID NO: 6307 - protein, 11 aa, Artificial
  IGFBP-2 heparin binding domain-containing peptide sequence
HHKVGVNEPRH

SEQ ID NO: 6308 - protein, 11 aa, Artificial
  IGFBP-2 heparin binding domain-containing peptide sequence
KKKVGVNEPRH

SEQ ID NO: 6309 - protein, 11 aa, Artificial
  IGFBP-2 heparin binding domain-containing peptide sequence
RKKVGVNEPRH

SEQ ID NO: 6310 - protein, 11 aa, Artificial
  IGFBP-2 heparin binding domain-containing peptide sequence
HKKVGVNEPRH

SEQ ID NO: 6311 - protein, 11 aa, Artificial
  IGFBP-2 heparin binding domain-containing peptide sequence
KRKVGVNEPRH

SEQ ID NO: 6312 - protein, 11 aa, Artificial
  IGFBP-2 heparin binding domain-containing peptide sequence
RRKVGVNEPRH

SEQ ID NO: 6313 - protein, 11 aa, Artificial
  IGFBP-2 heparin binding domain-containing peptide sequence
HRKVGVNEPRH

SEQ ID NO: 6314 - protein, 11 aa, Artificial
  IGFBP-2 heparin binding domain-containing peptide sequence
KHRVGVNEPRH

SEQ ID NO: 6315 - protein, 11 aa, Artificial
  IGFBP-2 heparin binding domain-containing peptide sequence
RHRVGVNEPRH

SEQ ID NO: 6316 - protein, 11 aa, Artificial
  IGFBP-2 heparin binding domain-containing peptide sequence
HHRVGVNEPRH

SEQ ID NO: 6317 - protein, 11 aa, Artificial
  IGFBP-2 heparin binding domain-containing peptide sequence
KKRVGVNEPRH

SEQ ID NO: 6318 - protein, 11 aa, Artificial
  IGFBP-2 heparin binding domain-containing peptide sequence
RKRVGVNEPRH

SEQ ID NO: 6319 - protein, 11 aa, Artificial
  IGFBP-2 heparin binding domain-containing peptide sequence
HKRVGVNEPRH

SEQ ID NO: 6320 - protein, 11 aa, Artificial
  IGFBP-2 heparin binding domain-containing peptide sequence
KRRVGVNEPRH

SEQ ID NO: 6321 - protein, 11 aa, Artificial
  IGFBP-2 heparin binding domain-containing peptide sequence
RRRVGVNEPRH

SEQ ID NO: 6322 - protein, 11 aa, Artificial
  IGFBP-2 heparin binding domain-containing peptide sequence
HRRVGVNEPRH

SEQ ID NO: 6323 - protein, 11 aa, Artificial
  IGFBP-2 heparin binding domain-containing peptide sequence
KHHLGLENPRH

SEQ ID NO: 6324 - protein, 11 aa, Artificial
  IGFBP-2 heparin binding domain-containing peptide sequence
RHHLGLENPRH

SEQ ID NO: 6325 - protein, 11 aa, Artificial
  IGFBP-2 heparin binding domain-containing peptide sequence
HHHLGLENPRH

SEQ ID NO: 6326 - protein, 11 aa, Artificial
  IGFBP-2 heparin binding domain-containing peptide sequence
KKHLGLENPRH

SEQ ID NO: 6327 - protein, 11 aa, Artificial
  IGFBP-2 heparin binding domain-containing peptide sequence
RKHLGLENPRH

SEQ ID NO: 6328 - protein, 11 aa, Artificial
  IGFBP-2 heparin binding domain-containing peptide sequence
HKHLGLENPRH

SEQ ID NO: 6329 - protein, 11 aa, Artificial
  IGFBP-2 heparin binding domain-containing peptide sequence
KRHLGLENPRH

SEQ ID NO: 6330 - protein, 11 aa, Artificial
  IGFBP-2 heparin binding domain-containing peptide sequence
RRHLGLENPRH

SEQ ID NO: 6331 - protein, 11 aa, Artificial
  IGFBP-2 heparin binding domain-containing peptide sequence
HRHLGLENPRH

SEQ ID NO: 6332 - protein, 11 aa, Artificial
  IGFBP-2 heparin binding domain-containing peptide sequence
KHKLGLENPRH

SEQ ID NO: 6333 - protein, 11 aa, Artificial
  IGFBP-2 heparin binding domain-containing peptide sequence
RHKLGLENPRH

SEQ ID NO: 6334 - protein, 11 aa, Artificial
  IGFBP-2 heparin binding domain-containing peptide sequence
HHKLGLENPRH

SEQ ID NO: 6335 - protein, 11 aa, Artificial
  IGFBP-2 heparin binding domain-containing peptide sequence
KKKLGLENPRH

SEQ ID NO: 6336 - protein, 11 aa, Artificial
  IGFBP-2 heparin binding domain-containing peptide sequence
RKKLGLENPRH

SEQ ID NO: 6337 - protein, 11 aa, Artificial
  IGFBP-2 heparin binding domain-containing peptide sequence
HKKLGLENPRH

SEQ ID NO: 6338 - protein, 11 aa, Artificial
  IGFBP-2 heparin binding domain-containing peptide sequence
KRKLGLENPRH

SEQ ID NO: 6339 - protein, 11 aa, Artificial
  IGFBP-2 heparin binding domain-containing peptide sequence
RRKLGLENPRH

SEQ ID NO: 6340 - protein, 11 aa, Artificial
  IGFBP-2 heparin binding domain-containing peptide sequence
HRKLGLENPRH

SEQ ID NO: 6341 - protein, 11 aa, Artificial
  IGFBP-2 heparin binding domain-containing peptide sequence
KHRLGLENPRH

SEQ ID NO: 6342 - protein, 11 aa, Artificial
  IGFBP-2 heparin binding domain-containing peptide sequence
RHRLGLENPRH

SEQ ID NO: 6343 - protein, 11 aa, Artificial
  IGFBP-2 heparin binding domain-containing peptide sequence
HHRLGLENPRH

SEQ ID NO: 6344 - protein, 11 aa, Artificial
  IGFBP-2 heparin binding domain-containing peptide sequence
KKRLGLENPRH

SEQ ID NO: 6345 - protein, 11 aa, Artificial
  IGFBP-2 heparin binding domain-containing peptide sequence
RKRLGLENPRH

SEQ ID NO: 6346 - protein, 11 aa, Artificial
  IGFBP-2 heparin binding domain-containing peptide sequence
HKRLGLENPRH

SEQ ID NO: 6347 - protein, 11 aa, Artificial
  IGFBP-2 heparin binding domain-containing peptide sequence
KRRLGLENPRH

SEQ ID NO: 6348 - protein, 11 aa, Artificial
  IGFBP-2 heparin binding domain-containing peptide sequence
RRRLGLENPRH

SEQ ID NO: 6349 - protein, 11 aa, Artificial
  IGFBP-2 heparin binding domain-containing peptide sequence
HRRLGLENPRH

SEQ ID NO: 6350 - protein, 11 aa, Artificial
  IGFBP-2 heparin binding domain-containing peptide sequence
KHHIGLENPRH

SEQ ID NO: 6351 - protein, 11 aa, Artificial
  IGFBP-2 heparin binding domain-containing peptide sequence
RHHIGLENPRH

SEQ ID NO: 6352 - protein, 11 aa, Artificial
  IGFBP-2 heparin binding domain-containing peptide sequence
HHHIGLENPRH

SEQ ID NO: 6353 - protein, 11 aa, Artificial
  IGFBP-2 heparin binding domain-containing peptide sequence
KKHIGLENPRH

SEQ ID NO: 6354 - protein, 11 aa, Artificial
  IGFBP-2 heparin binding domain-containing peptide sequence
RKHIGLENPRH

SEQ ID NO: 6355 - protein, 11 aa, Artificial
  IGFBP-2 heparin binding domain-containing peptide sequence
HKHIGLENPRH

SEQ ID NO: 6356 - protein, 11 aa, Artificial
  IGFBP-2 heparin binding domain-containing peptide sequence
KRHIGLENPRH

SEQ ID NO: 6357 - protein, 11 aa, Artificial
  IGFBP-2 heparin binding domain-containing peptide sequence
RRHIGLENPRH

SEQ ID NO: 6358 - protein, 11 aa, Artificial
  IGFBP-2 heparin binding domain-containing peptide sequence
HRHIGLENPRH

SEQ ID NO: 6359 - protein, 11 aa, Artificial
  IGFBP-2 heparin binding domain-containing peptide sequence
KHKIGLENPRH

SEQ ID NO: 6360 - protein, 11 aa, Artificial
  IGFBP-2 heparin binding domain-containing peptide sequence
RHKIGLENPRH

SEQ ID NO: 6361 - protein, 11 aa, Artificial
  IGFBP-2 heparin binding domain-containing peptide sequence
HHKIGLENPRH

SEQ ID NO: 6362 - protein, 11 aa, Artificial
  IGFBP-2 heparin binding domain-containing peptide sequence
KKKIGLENPRH

SEQ ID NO: 6363 - protein, 11 aa, Artificial
  IGFBP-2 heparin binding domain-containing peptide sequence
RKKIGLENPRH

SEQ ID NO: 6364 - protein, 11 aa, Artificial
  IGFBP-2 heparin binding domain-containing peptide sequence
HKKIGLENPRH

SEQ ID NO: 6365 - protein, 11 aa, Artificial
  IGFBP-2 heparin binding domain-containing peptide sequence
KRKIGLENPRH

SEQ ID NO: 6366 - protein, 11 aa, Artificial
  IGFBP-2 heparin binding domain-containing peptide sequence
RRKIGLENPRH

SEQ ID NO: 6367 - protein, 11 aa, Artificial
  IGFBP-2 heparin binding domain-containing peptide sequence
HRKIGLENPRH

SEQ ID NO: 6368 - protein, 11 aa, Artificial
  IGFBP-2 heparin binding domain-containing peptide sequence
KHRIGLENPRH

SEQ ID NO: 6369 - protein, 11 aa, Artificial
  IGFBP-2 heparin binding domain-containing peptide sequence
RHRIGLENPRH

SEQ ID NO: 6370 - protein, 11 aa, Artificial
  IGFBP-2 heparin binding domain-containing peptide sequence
HHRIGLENPRH

SEQ ID NO: 6371 - protein, 11 aa, Artificial
  IGFBP-2 heparin binding domain-containing peptide sequence
KKRIGLENPRH

SEQ ID NO: 6372 - protein, 11 aa, Artificial
  IGFBP-2 heparin binding domain-containing peptide sequence
RKRIGLENPRH

SEQ ID NO: 6373 - protein, 11 aa, Artificial
  IGFBP-2 heparin binding domain-containing peptide sequence
HKRIGLENPRH

SEQ ID NO: 6374 - protein, 11 aa, Artificial
  IGFBP-2 heparin binding domain-containing peptide sequence
KRRIGLENPRH

SEQ ID NO: 6375 - protein, 11 aa, Artificial
  IGFBP-2 heparin binding domain-containing peptide sequence
RRRIGLENPRH

SEQ ID NO: 6376 - protein, 11 aa, Artificial
  IGFBP-2 heparin binding domain-containing peptide sequence
HRRIGLENPRH

SEQ ID NO: 6377 - protein, 11 aa, Artificial
  IGFBP-2 heparin binding domain-containing peptide sequence
KHHVGLENPRH

SEQ ID NO: 6378 - protein, 11 aa, Artificial
  IGFBP-2 heparin binding domain-containing peptide sequence
RHHVGLENPRH

SEQ ID NO: 6379 - protein, 11 aa, Artificial
  IGFBP-2 heparin binding domain-containing peptide sequence
HHHVGLENPRH

SEQ ID NO: 6380 - protein, 11 aa, Artificial
  IGFBP-2 heparin binding domain-containing peptide sequence
KKHVGLENPRH

SEQ ID NO: 6381 - protein, 11 aa, Artificial
  IGFBP-2 heparin binding domain-containing peptide sequence
RKHVGLENPRH

SEQ ID NO: 6382 - protein, 11 aa, Artificial
  IGFBP-2 heparin binding domain-containing peptide sequence
HKHVGLENPRH

SEQ ID NO: 6383 - protein, 11 aa, Artificial
  IGFBP-2 heparin binding domain-containing peptide sequence
KRHVGLENPRH

SEQ ID NO: 6384 - protein, 11 aa, Artificial
  IGFBP-2 heparin binding domain-containing peptide sequence
RRHVGLENPRH

SEQ ID NO: 6385 - protein, 11 aa, Artificial
  IGFBP-2 heparin binding domain-containing peptide sequence
HRHVGLENPRH

SEQ ID NO: 6386 - protein, 11 aa, Artificial
  IGFBP-2 heparin binding domain-containing peptide sequence
KHKVGLENPRH

SEQ ID NO: 6387 - protein, 11 aa, Artificial
  IGFBP-2 heparin binding domain-containing peptide sequence
RHKVGLENPRH

SEQ ID NO: 6388 - protein, 11 aa, Artificial
  IGFBP-2 heparin binding domain-containing peptide sequence
HHKVGLENPRH

SEQ ID NO: 6389 - protein, 11 aa, Artificial
  IGFBP-2 heparin binding domain-containing peptide sequence
KKKVGLENPRH

SEQ ID NO: 6390 - protein, 11 aa, Artificial
  IGFBP-2 heparin binding domain-containing peptide sequence
RKKVGLENPRH

SEQ ID NO: 6391 - protein, 11 aa, Artificial
  IGFBP-2 heparin binding domain-containing peptide sequence
HKKVGLENPRH

SEQ ID NO: 6392 - protein, 11 aa, Artificial
  IGFBP-2 heparin binding domain-containing peptide sequence
KRKVGLENPRH

SEQ ID NO: 6393 - protein, 11 aa, Artificial
  IGFBP-2 heparin binding domain-containing peptide sequence
RRKVGLENPRH

SEQ ID NO: 6394 - protein, 11 aa, Artificial
  IGFBP-2 heparin binding domain-containing peptide sequence
HRKVGLENPRH

SEQ ID NO: 6395 - protein, 11 aa, Artificial
  IGFBP-2 heparin binding domain-containing peptide sequence
KHRVGLENPRH

SEQ ID NO: 6396 - protein, 11 aa, Artificial
  IGFBP-2 heparin binding domain-containing peptide sequence
RHRVGLENPRH

SEQ ID NO: 6397 - protein, 11 aa, Artificial
  IGFBP-2 heparin binding domain-containing peptide sequence
HHRVGLENPRH

SEQ ID NO: 6398 - protein, 11 aa, Artificial
  IGFBP-2 heparin binding domain-containing peptide sequence
KKRVGLENPRH

SEQ ID NO: 6399 - protein, 11 aa, Artificial
  IGFBP-2 heparin binding domain-containing peptide sequence
RKRVGLENPRH

SEQ ID NO: 6400 - protein, 11 aa, Artificial
  IGFBP-2 heparin binding domain-containing peptide sequence
HKRVGLENPRH

SEQ ID NO: 6401 - protein, 11 aa, Artificial
  IGFBP-2 heparin binding domain-containing peptide sequence
KRRVGLENPRH

SEQ ID NO: 6402 - protein, 11 aa, Artificial
  IGFBP-2 heparin binding domain-containing peptide sequence
RRRVGLENPRH

SEQ ID NO: 6403 - protein, 11 aa, Artificial
  IGFBP-2 heparin binding domain-containing peptide sequence
HRRVGLENPRH

SEQ ID NO: 6404 - protein, 11 aa, Artificial
  IGFBP-2 heparin binding domain-containing peptide sequence
KHHLGIENPRH

SEQ ID NO: 6405 - protein, 11 aa, Artificial
  IGFBP-2 heparin binding domain-containing peptide sequence
RHHLGIENPRH

SEQ ID NO: 6406 - protein, 11 aa, Artificial
  IGFBP-2 heparin binding domain-containing peptide sequence
HHHLGIENPRH

SEQ ID NO: 6407 - protein, 11 aa, Artificial
  IGFBP-2 heparin binding domain-containing peptide sequence
KKHLGIENPRH

SEQ ID NO: 6408 - protein, 11 aa, Artificial
  IGFBP-2 heparin binding domain-containing peptide sequence
RKHLGIENPRH

SEQ ID NO: 6409 - protein, 11 aa, Artificial
  IGFBP-2 heparin binding domain-containing peptide sequence
HKHLGIENPRH

SEQ ID NO: 6410 - protein, 11 aa, Artificial
  IGFBP-2 heparin binding domain-containing peptide sequence
KRHLGIENPRH

SEQ ID NO: 6411 - protein, 11 aa, Artificial
  IGFBP-2 heparin binding domain-containing peptide sequence
RRHLGIENPRH

SEQ ID NO: 6412 - protein, 11 aa, Artificial
  IGFBP-2 heparin binding domain-containing peptide sequence
HRHLGIENPRH

SEQ ID NO: 6413 - protein, 11 aa, Artificial
  IGFBP-2 heparin binding domain-containing peptide sequence
KHKLGIENPRH

SEQ ID NO: 6414 - protein, 11 aa, Artificial
  IGFBP-2 heparin binding domain-containing peptide sequence
RHKLGIENPRH

SEQ ID NO: 6415 - protein, 11 aa, Artificial
  IGFBP-2 heparin binding domain-containing peptide sequence
HHKLGIENPRH

SEQ ID NO: 6416 - protein, 11 aa, Artificial
  IGFBP-2 heparin binding domain-containing peptide sequence
KKKLGIENPRH

SEQ ID NO: 6417 - protein, 11 aa, Artificial
  IGFBP-2 heparin binding domain-containing peptide sequence
RKKLGIENPRH

SEQ ID NO: 6418 - protein, 11 aa, Artificial
  IGFBP-2 heparin binding domain-containing peptide sequence
HKKLGIENPRH

SEQ ID NO: 6419 - protein, 11 aa, Artificial
  IGFBP-2 heparin binding domain-containing peptide sequence
KRKLGIENPRH

SEQ ID NO: 6420 - protein, 11 aa, Artificial
  IGFBP-2 heparin binding domain-containing peptide sequence
RRKLGIENPRH

SEQ ID NO: 6421 - protein, 11 aa, Artificial
  IGFBP-2 heparin binding domain-containing peptide sequence
HRKLGIENPRH

SEQ ID NO: 6422 - protein, 11 aa, Artificial
  IGFBP-2 heparin binding domain-containing peptide sequence
KHRLGIENPRH

SEQ ID NO: 6423 - protein, 11 aa, Artificial
  IGFBP-2 heparin binding domain-containing peptide sequence
RHRLGIENPRH

SEQ ID NO: 6424 - protein, 11 aa, Artificial
  IGFBP-2 heparin binding domain-containing peptide sequence
HHRLGIENPRH

SEQ ID NO: 6425 - protein, 11 aa, Artificial
  IGFBP-2 heparin binding domain-containing peptide sequence
KKRLGIENPRH

SEQ ID NO: 6426 - protein, 11 aa, Artificial
  IGFBP-2 heparin binding domain-containing peptide sequence
RKRLGIENPRH

SEQ ID NO: 6427 - protein, 11 aa, Artificial
  IGFBP-2 heparin binding domain-containing peptide sequence
HKRLGIENPRH

SEQ ID NO: 6428 - protein, 11 aa, Artificial
  IGFBP-2 heparin binding domain-containing peptide sequence
KRRLGIENPRH

SEQ ID NO: 6429 - protein, 11 aa, Artificial
  IGFBP-2 heparin binding domain-containing peptide sequence
RRRLGIENPRH

SEQ ID NO: 6430 - protein, 11 aa, Artificial
  IGFBP-2 heparin binding domain-containing peptide sequence
HRRLGIENPRH

SEQ ID NO: 6431 - protein, 11 aa, Artificial
  IGFBP-2 heparin binding domain-containing peptide sequence
KHHIGIENPRH

SEQ ID NO: 6432 - protein, 11 aa, Artificial
  IGFBP-2 heparin binding domain-containing peptide sequence
RHHIGIENPRH

SEQ ID NO: 6433 - protein, 11 aa, Artificial
  IGFBP-2 heparin binding domain-containing peptide sequence
HHHIGIENPRH

SEQ ID NO: 6434 - protein, 11 aa, Artificial
  IGFBP-2 heparin binding domain-containing peptide sequence
KKHIGIENPRH

SEQ ID NO: 6435 - protein, 11 aa, Artificial
  IGFBP-2 heparin binding domain-containing peptide sequence
RKHIGIENPRH

SEQ ID NO: 6436 - protein, 11 aa, Artificial
  IGFBP-2 heparin binding domain-containing peptide sequence
HKHIGIENPRH

SEQ ID NO: 6437 - protein, 11 aa, Artificial
  IGFBP-2 heparin binding domain-containing peptide sequence
KRHIGIENPRH

SEQ ID NO: 6438 - protein, 11 aa, Artificial
  IGFBP-2 heparin binding domain-containing peptide sequence
RRHIGIENPRH

SEQ ID NO: 6439 - protein, 11 aa, Artificial
  IGFBP-2 heparin binding domain-containing peptide sequence
HRHIGIENPRH

SEQ ID NO: 6440 - protein, 11 aa, Artificial
  IGFBP-2 heparin binding domain-containing peptide sequence
KHKIGIENPRH

SEQ ID NO: 6441 - protein, 11 aa, Artificial
  IGFBP-2 heparin binding domain-containing peptide sequence
RHKIGIENPRH

SEQ ID NO: 6442 - protein, 11 aa, Artificial
  IGFBP-2 heparin binding domain-containing peptide sequence
HHKIGIENPRH

SEQ ID NO: 6443 - protein, 11 aa, Artificial
  IGFBP-2 heparin binding domain-containing peptide sequence
KKKIGIENPRH

SEQ ID NO: 6444 - protein, 11 aa, Artificial
  IGFBP-2 heparin binding domain-containing peptide sequence
RKKIGIENPRH

SEQ ID NO: 6445 - protein, 11 aa, Artificial
  IGFBP-2 heparin binding domain-containing peptide sequence
HKKIGIENPRH

SEQ ID NO: 6446 - protein, 11 aa, Artificial
  IGFBP-2 heparin binding domain-containing peptide sequence
KRKIGIENPRH

SEQ ID NO: 6447 - protein, 11 aa, Artificial
  IGFBP-2 heparin binding domain-containing peptide sequence
RRKIGIENPRH

SEQ ID NO: 6448 - protein, 11 aa, Artificial
  IGFBP-2 heparin binding domain-containing peptide sequence
HRKIGIENPRH

SEQ ID NO: 6449 - protein, 11 aa, Artificial
  IGFBP-2 heparin binding domain-containing peptide sequence
KHRIGIENPRH

SEQ ID NO: 6450 - protein, 11 aa, Artificial
  IGFBP-2 heparin binding domain-containing peptide sequence
RHRIGIENPRH

SEQ ID NO: 6451 - protein, 11 aa, Artificial
  IGFBP-2 heparin binding domain-containing peptide sequence
HHRIGIENPRH

SEQ ID NO: 6452 - protein, 11 aa, Artificial
  IGFBP-2 heparin binding domain-containing peptide sequence
KKRIGIENPRH

SEQ ID NO: 6453 - protein, 11 aa, Artificial
  IGFBP-2 heparin binding domain-containing peptide sequence
RKRIGIENPRH

SEQ ID NO: 6454 - protein, 11 aa, Artificial
  IGFBP-2 heparin binding domain-containing peptide sequence
HKRIGIENPRH

SEQ ID NO: 6455 - protein, 11 aa, Artificial
  IGFBP-2 heparin binding domain-containing peptide sequence
KRRIGIENPRH

SEQ ID NO: 6456 - protein, 11 aa, Artificial
  IGFBP-2 heparin binding domain-containing peptide sequence
RRRIGIENPRH

SEQ ID NO: 6457 - protein, 11 aa, Artificial
  IGFBP-2 heparin binding domain-containing peptide sequence
HRRIGIENPRH

SEQ ID NO: 6458 - protein, 11 aa, Artificial
  IGFBP-2 heparin binding domain-containing peptide sequence
KHHVGIENPRH

SEQ ID NO: 6459 - protein, 11 aa, Artificial
  IGFBP-2 heparin binding domain-containing peptide sequence
RHHVGIENPRH

SEQ ID NO: 6460 - protein, 11 aa, Artificial
  IGFBP-2 heparin binding domain-containing peptide sequence
HHHVGIENPRH

SEQ ID NO: 6461 - protein, 11 aa, Artificial
  IGFBP-2 heparin binding domain-containing peptide sequence
KKHVGIENPRH

SEQ ID NO: 6462 - protein, 11 aa, Artificial
  IGFBP-2 heparin binding domain-containing peptide sequence
RKHVGIENPRH

SEQ ID NO: 6463 - protein, 11 aa, Artificial
  IGFBP-2 heparin binding domain-containing peptide sequence
HKHVGIENPRH

SEQ ID NO: 6464 - protein, 11 aa, Artificial
  IGFBP-2 heparin binding domain-containing peptide sequence
KRHVGIENPRH

SEQ ID NO: 6465 - protein, 11 aa, Artificial
  IGFBP-2 heparin binding domain-containing peptide sequence
RRHVGIENPRH

SEQ ID NO: 6466 - protein, 11 aa, Artificial
  IGFBP-2 heparin binding domain-containing peptide sequence
HRHVGIENPRH

SEQ ID NO: 6467 - protein, 11 aa, Artificial
  IGFBP-2 heparin binding domain-containing peptide sequence
KHKVGIENPRH

SEQ ID NO: 6468 - protein, 11 aa, Artificial
  IGFBP-2 heparin binding domain-containing peptide sequence
RHKVGIENPRH

SEQ ID NO: 6469 - protein, 11 aa, Artificial
  IGFBP-2 heparin binding domain-containing peptide sequence
HHKVGIENPRH

SEQ ID NO: 6470 - protein, 11 aa, Artificial
  IGFBP-2 heparin binding domain-containing peptide sequence
KKKVGIENPRH

SEQ ID NO: 6471 - protein, 11 aa, Artificial
  IGFBP-2 heparin binding domain-containing peptide sequence
RKKVGIENPRH

SEQ ID NO: 6472 - protein, 11 aa, Artificial
  IGFBP-2 heparin binding domain-containing peptide sequence
HKKVGIENPRH

SEQ ID NO: 6473 - protein, 11 aa, Artificial
  IGFBP-2 heparin binding domain-containing peptide sequence
KRKVGIENPRH

SEQ ID NO: 6474 - protein, 11 aa, Artificial
  IGFBP-2 heparin binding domain-containing peptide sequence
RRKVGIENPRH

SEQ ID NO: 6475 - protein, 11 aa, Artificial
  IGFBP-2 heparin binding domain-containing peptide sequence
HRKVGIENPRH

SEQ ID NO: 6476 - protein, 11 aa, Artificial
  IGFBP-2 heparin binding domain-containing peptide sequence
KHRVGIENPRH

SEQ ID NO: 6477 - protein, 11 aa, Artificial
  IGFBP-2 heparin binding domain-containing peptide sequence
RHRVGIENPRH

SEQ ID NO: 6478 - protein, 11 aa, Artificial
  IGFBP-2 heparin binding domain-containing peptide sequence
HHRVGIENPRH

SEQ ID NO: 6479 - protein, 11 aa, Artificial
  IGFBP-2 heparin binding domain-containing peptide sequence
KKRVGIENPRH

SEQ ID NO: 6480 - protein, 11 aa, Artificial
  IGFBP-2 heparin binding domain-containing peptide sequence
RKRVGIENPRH

SEQ ID NO: 6481 - protein, 11 aa, Artificial
  IGFBP-2 heparin binding domain-containing peptide sequence
HKRVGIENPRH

SEQ ID NO: 6482 - protein, 11 aa, Artificial
  IGFBP-2 heparin binding domain-containing peptide sequence
KRRVGIENPRH

SEQ ID NO: 6483 - protein, 11 aa, Artificial
  IGFBP-2 heparin binding domain-containing peptide sequence
RRRVGIENPRH

SEQ ID NO: 6484 - protein, 11 aa, Artificial
  IGFBP-2 heparin binding domain-containing peptide sequence
HRRVGIENPRH

SEQ ID NO: 6485 - protein, 11 aa, Artificial
  IGFBP-2 heparin binding domain-containing peptide sequence
KHHLGVENPRH

SEQ ID NO: 6486 - protein, 11 aa, Artificial
  IGFBP-2 heparin binding domain-containing peptide sequence
RHHLGVENPRH

SEQ ID NO: 6487 - protein, 11 aa, Artificial
  IGFBP-2 heparin binding domain-containing peptide sequence
HHHLGVENPRH

SEQ ID NO: 6488 - protein, 11 aa, Artificial
  IGFBP-2 heparin binding domain-containing peptide sequence
KKHLGVENPRH

SEQ ID NO: 6489 - protein, 11 aa, Artificial
  IGFBP-2 heparin binding domain-containing peptide sequence
RKHLGVENPRH

SEQ ID NO: 6490 - protein, 11 aa, Artificial
  IGFBP-2 heparin binding domain-containing peptide sequence
HKHLGVENPRH

SEQ ID NO: 6491 - protein, 11 aa, Artificial
  IGFBP-2 heparin binding domain-containing peptide sequence
KRHLGVENPRH

SEQ ID NO: 6492 - protein, 11 aa, Artificial
  IGFBP-2 heparin binding domain-containing peptide sequence
RRHLGVENPRH

SEQ ID NO: 6493 - protein, 11 aa, Artificial
  IGFBP-2 heparin binding domain-containing peptide sequence
HRHLGVENPRH

SEQ ID NO: 6494 - protein, 11 aa, Artificial
  IGFBP-2 heparin binding domain-containing peptide sequence
KHKLGVENPRH

SEQ ID NO: 6495 - protein, 11 aa, Artificial
  IGFBP-2 heparin binding domain-containing peptide sequence
RHKLGVENPRH

SEQ ID NO: 6496 - protein, 11 aa, Artificial
  IGFBP-2 heparin binding domain-containing peptide sequence
HHKLGVENPRH

SEQ ID NO: 6497 - protein, 11 aa, Artificial
  IGFBP-2 heparin binding domain-containing peptide sequence
KKKLGVENPRH

SEQ ID NO: 6498 - protein, 11 aa, Artificial
  IGFBP-2 heparin binding domain-containing peptide sequence
RKKLGVENPRH

SEQ ID NO: 6499 - protein, 11 aa, Artificial
  IGFBP-2 heparin binding domain-containing peptide sequence
HKKLGVENPRH

SEQ ID NO: 6500 - protein, 11 aa, Artificial
  IGFBP-2 heparin binding domain-containing peptide sequence
KRKLGVENPRH

SEQ ID NO: 6501 - protein, 11 aa, Artificial
  IGFBP-2 heparin binding domain-containing peptide sequence
RRKLGVENPRH

SEQ ID NO: 6502 - protein, 11 aa, Artificial
  IGFBP-2 heparin binding domain-containing peptide sequence
HRKLGVENPRH

SEQ ID NO: 6503 - protein, 11 aa, Artificial
  IGFBP-2 heparin binding domain-containing peptide sequence
KHRLGVENPRH

SEQ ID NO: 6504 - protein, 11 aa, Artificial
  IGFBP-2 heparin binding domain-containing peptide sequence
RHRLGVENPRH

SEQ ID NO: 6505 - protein, 11 aa, Artificial
  IGFBP-2 heparin binding domain-containing peptide sequence
HHRLGVENPRH

SEQ ID NO: 6506 - protein, 11 aa, Artificial
  IGFBP-2 heparin binding domain-containing peptide sequence
KKRLGVENPRH

SEQ ID NO: 6507 - protein, 11 aa, Artificial
  IGFBP-2 heparin binding domain-containing peptide sequence
RKRLGVENPRH

SEQ ID NO: 6508 - protein, 11 aa, Artificial
  IGFBP-2 heparin binding domain-containing peptide sequence
HKRLGVENPRH

SEQ ID NO: 6509 - protein, 11 aa, Artificial
  IGFBP-2 heparin binding domain-containing peptide sequence
KRRLGVENPRH

SEQ ID NO: 6510 - protein, 11 aa, Artificial
  IGFBP-2 heparin binding domain-containing peptide sequence
RRRLGVENPRH

SEQ ID NO: 6511 - protein, 11 aa, Artificial
  IGFBP-2 heparin binding domain-containing peptide sequence
HRRLGVENPRH

SEQ ID NO: 6512 - protein, 11 aa, Artificial
  IGFBP-2 heparin binding domain-containing peptide sequence
KHHIGVENPRH

SEQ ID NO: 6513 - protein, 11 aa, Artificial
  IGFBP-2 heparin binding domain-containing peptide sequence
RHHIGVEEPRH

SEQ ID NO: 6514 - protein, 11 aa, Artificial
  IGFBP-2 heparin binding domain-containing peptide sequence
HHHIGVENPRH

SEQ ID NO: 6515 - protein, 11 aa, Artificial
  IGFBP-2 heparin binding domain-containing peptide sequence
KKHIGVENPRH

SEQ ID NO: 6516 - protein, 11 aa, Artificial
  IGFBP-2 heparin binding domain-containing peptide sequence
RKHIGVENPRH

SEQ ID NO: 6517 - protein, 11 aa, Artificial
  IGFBP-2 heparin binding domain-containing peptide sequence
HKHIGVENPRH

SEQ ID NO: 6518 - protein, 11 aa, Artificial
  IGFBP-2 heparin binding domain-containing peptide sequence
KRHIGVENPRH

SEQ ID NO: 6519 - protein, 11 aa, Artificial
  IGFBP-2 heparin binding domain-containing peptide sequence
RRHIGVENPRH

SEQ ID NO: 6520 - protein, 11 aa, Artificial
  IGFBP-2 heparin binding domain-containing peptide sequence
HRHIGVENPRH

SEQ ID NO: 6521 - protein, 11 aa, Artificial
  IGFBP-2 heparin binding domain-containing peptide sequence
KHKIGVENPRH

SEQ ID NO: 6522 - protein, 11 aa, Artificial
  IGFBP-2 heparin binding domain-containing peptide sequence
RHKIGVENPRH

SEQ ID NO: 6523 - protein, 11 aa, Artificial
  IGFBP-2 heparin binding domain-containing peptide sequence
HHKIGVENPRH

SEQ ID NO: 6524 - protein, 11 aa, Artificial
  IGFBP-2 heparin binding domain-containing peptide sequence
KKKIGVENPRH

SEQ ID NO: 6525 - protein, 11 aa, Artificial
  IGFBP-2 heparin binding domain-containing peptide sequence
RKKIGVENPRH

SEQ ID NO: 6526 - protein, 11 aa, Artificial
  IGFBP-2 heparin binding domain-containing peptide sequence
HKKIGVENPRH

SEQ ID NO: 6527 - protein, 11 aa, Artificial
  IGFBP-2 heparin binding domain-containing peptide sequence
KRKIGVENPRH

SEQ ID NO: 6528 - protein, 11 aa, Artificial
  IGFBP-2 heparin binding domain-containing peptide sequence
RRKIGVENPRH

SEQ ID NO: 6529 - protein, 11 aa, Artificial
  IGFBP-2 heparin binding domain-containing peptide sequence
HRKIGVENPRH

SEQ ID NO: 6530 - protein, 11 aa, Artificial
  IGFBP-2 heparin binding domain-containing peptide sequence
KHRIGVENPRH

SEQ ID NO: 6531 - protein, 11 aa, Artificial
  IGFBP-2 heparin binding domain-containing peptide sequence
RHRIGVENPRH

SEQ ID NO: 6532 - protein, 11 aa, Artificial
  IGFBP-2 heparin binding domain-containing peptide sequence
HHRIGVENPRH

SEQ ID NO: 6533 - protein, 11 aa, Artificial
  IGFBP-2 heparin binding domain-containing peptide sequence
KKRIGVENPRH

SEQ ID NO: 6534 - protein, 11 aa, Artificial
  IGFBP-2 heparin binding domain-containing peptide sequence
RKRIGVENPRH

SEQ ID NO: 6535 - protein, 11 aa, Artificial
  IGFBP-2 heparin binding domain-containing peptide sequence
HKRIGVENPRH

SEQ ID NO: 6536 - protein, 11 aa, Artificial
  IGFBP-2 heparin binding domain-containing peptide sequence
KRRIGVENPRH

SEQ ID NO: 6537 - protein, 11 aa, Artificial
  IGFBP-2 heparin binding domain-containing peptide sequence
RRRIGVENPRH

SEQ ID NO: 6538 - protein, 11 aa, Artificial
  IGFBP-2 heparin binding domain-containing peptide sequence
HRRIGVENPRH

SEQ ID NO: 6539 - protein, 11 aa, Artificial
  IGFBP-2 heparin binding domain-containing peptide sequence
KHHVGVENPRH

SEQ ID NO: 6540 - protein, 11 aa, Artificial
  IGFBP-2 heparin binding domain-containing peptide sequence
RHHVGVENPRH

SEQ ID NO: 6541 - protein, 11 aa, Artificial
  IGFBP-2 heparin binding domain-containing peptide sequence
HHHVGVENPRH

SEQ ID NO: 6542 - protein, 11 aa, Artificial
  IGFBP-2 heparin binding domain-containing peptide sequence
KKHVGVENPRH

SEQ ID NO: 6543 - protein, 11 aa, Artificial
  IGFBP-2 heparin binding domain-containing peptide sequence
RKHVGVENPRH

SEQ ID NO: 6544 - protein, 11 aa, Artificial
  IGFBP-2 heparin binding domain-containing peptide sequence
HKHVGVENPRH

SEQ ID NO: 6545 - protein, 11 aa, Artificial
  IGFBP-2 heparin binding domain-containing peptide sequence
KRHVGVENPRH

SEQ ID NO: 6546 - protein, 11 aa, Artificial
  IGFBP-2 heparin binding domain-containing peptide sequence
RRHVGVENPRH

SEQ ID NO: 6547 - protein, 11 aa, Artificial
  IGFBP-2 heparin binding domain-containing peptide sequence
HRHVGVENPRH

SEQ ID NO: 6548 - protein, 11 aa, Artificial
  IGFBP-2 heparin binding domain-containing peptide sequence
KHKVGVENPRH

SEQ ID NO: 6549 - protein, 11 aa, Artificial
  IGFBP-2 heparin binding domain-containing peptide sequence
RHKVGVENPRH

SEQ ID NO: 6550 - protein, 11 aa, Artificial
  IGFBP-2 heparin binding domain-containing peptide sequence
HHKVGVENPRH

SEQ ID NO: 6551 - protein, 11 aa, Artificial
  IGFBP-2 heparin binding domain-containing peptide sequence
KKKVGVENPRH

SEQ ID NO: 6552 - protein, 11 aa, Artificial
  IGFBP-2 heparin binding domain-containing peptide sequence
RKKVGVENPRH

SEQ ID NO: 6553 - protein, 11 aa, Artificial
  IGFBP-2 heparin binding domain-containing peptide sequence
HKKVGVENPRH

SEQ ID NO: 6554 - protein, 11 aa, Artificial
  IGFBP-2 heparin binding domain-containing peptide sequence
KRKVGVENPRH

SEQ ID NO: 6555 - protein, 11 aa, Artificial
  IGFBP-2 heparin binding domain-containing peptide sequence
RRKVGVEEPRH

SEQ ID NO: 6556 - protein, 11 aa, Artificial
  IGFBP-2 heparin binding domain-containing peptide sequence
HRKVGVENPRH

SEQ ID NO: 6557 - protein, 11 aa, Artificial
  IGFBP-2 heparin binding domain-containing peptide sequence
KHRVGVENPRH

SEQ ID NO: 6558 - protein, 11 aa, Artificial
  IGFBP-2 heparin binding domain-containing peptide sequence
RHRVGVENPRH

SEQ ID NO: 6559 - protein, 11 aa, Artificial
  IGFBP-2 heparin binding domain-containing peptide sequence
HHRVGVENPRH

SEQ ID NO: 6560 - protein, 11 aa, Artificial
  IGFBP-2 heparin binding domain-containing peptide sequence
KKRVGVENPRH

SEQ ID NO: 6561 - protein, 11 aa, Artificial
  IGFBP-2 heparin binding domain-containing peptide sequence
RKRVGVENPRH

SEQ ID NO: 6562 - protein, 11 aa, Artificial
  IGFBP-2 heparin binding domain-containing peptide sequence
HKRVGVENPRH

SEQ ID NO: 6563 - protein, 11 aa, Artificial
  IGFBP-2 heparin binding domain-containing peptide sequence
KRRVGVENPRH

SEQ ID NO: 6564 - protein, 11 aa, Artificial
  IGFBP-2 heparin binding domain-containing peptide sequence
RRRVGVENPRH

SEQ ID NO: 6565 - protein, 11 aa, Artificial
  IGFBP-2 heparin binding domain-containing peptide sequence
HRRVGVENPRH

SEQ ID NO: 6566 - protein, 11 aa, Artificial
  IGFBP-2 heparin binding domain-containing peptide sequence
KHHLGLNNPRH

SEQ ID NO: 6567 - protein, 11 aa, Artificial
  IGFBP-2 heparin binding domain-containing peptide sequence
RHHLGLNNPRH

SEQ ID NO: 6568 - protein, 11 aa, Artificial
  IGFBP-2 heparin binding domain-containing peptide sequence
HHHLGLNNPRH

SEQ ID NO: 6569 - protein, 11 aa, Artificial
  IGFBP-2 heparin binding domain-containing peptide sequence
KKHLGLNNPRH

SEQ ID NO: 6570 - protein, 11 aa, Artificial
  IGFBP-2 heparin binding domain-containing peptide sequence
RKHLGLNNPRH

SEQ ID NO: 6571 - protein, 11 aa, Artificial
  IGFBP-2 heparin binding domain-containing peptide sequence
HKHLGLNNPRH

SEQ ID NO: 6572 - protein, 11 aa, Artificial
  IGFBP-2 heparin binding domain-containing peptide sequence
KRHLGLNNPRH

SEQ ID NO: 6573 - protein, 11 aa, Artificial
  IGFBP-2 heparin binding domain-containing peptide sequence
RRHLGLNNPRH

SEQ ID NO: 6574 - protein, 11 aa, Artificial
  IGFBP-2 heparin binding domain-containing peptide sequence
HRHLGLNNPRH

SEQ ID NO: 6575 - protein, 11 aa, Artificial
  IGFBP-2 heparin binding domain-containing peptide sequence
KHKLGLNNPRH

SEQ ID NO: 6576 - protein, 11 aa, Artificial
  IGFBP-2 heparin binding domain-containing peptide sequence
RHKLGLNNPRH

SEQ ID NO: 6577 - protein, 11 aa, Artificial
  IGFBP-2 heparin binding domain-containing peptide sequence
HHKLGLNNPRH

SEQ ID NO: 6578 - protein, 11 aa, Artificial
  IGFBP-2 heparin binding domain-containing peptide sequence
KKKLGLNNPRH

SEQ ID NO: 6579 - protein, 11 aa, Artificial
  IGFBP-2 heparin binding domain-containing peptide sequence
RKKLGLNNPRH

SEQ ID NO: 6580 - protein, 11 aa, Artificial
  IGFBP-2 heparin binding domain-containing peptide sequence
HKKLGLNNPRH

SEQ ID NO: 6581 - protein, 11 aa, Artificial
  IGFBP-2 heparin binding domain-containing peptide sequence
KRKLGLNNPRH

SEQ ID NO: 6582 - protein, 11 aa, Artificial
  IGFBP-2 heparin binding domain-containing peptide sequence
RRKLGLNNPRH

SEQ ID NO: 6583 - protein, 11 aa, Artificial
  IGFBP-2 heparin binding domain-containing peptide sequence
HRKLGLNNPRH

SEQ ID NO: 6584 - protein, 11 aa, Artificial
  IGFBP-2 heparin binding domain-containing peptide sequence
KHRLGLNNPRH

SEQ ID NO: 6585 - protein, 11 aa, Artificial
  IGFBP-2 heparin binding domain-containing peptide sequence
RHRLGLNNPRH

SEQ ID NO: 6586 - protein, 11 aa, Artificial
  IGFBP-2 heparin binding domain-containing peptide sequence
HHRLGLNNPRH

SEQ ID NO: 6587 - protein, 11 aa, Artificial
  IGFBP-2 heparin binding domain-containing peptide sequence
KKRLGLNNPRH

SEQ ID NO: 6588 - protein, 11 aa, Artificial
  IGFBP-2 heparin binding domain-containing peptide sequence
RKRLGLNNPRH

SEQ ID NO: 6589 - protein, 11 aa, Artificial
  IGFBP-2 heparin binding domain-containing peptide sequence
HKRLGLNNPRH

SEQ ID NO: 6590 - protein, 11 aa, Artificial
  IGFBP-2 heparin binding domain-containing peptide sequence
KRRLGLNNPRH

SEQ ID NO: 6591 - protein, 11 aa, Artificial
  IGFBP-2 heparin binding domain-containing peptide sequence
RRRLGLNNPRH

SEQ ID NO: 6592 - protein, 11 aa, Artificial
  IGFBP-2 heparin binding domain-containing peptide sequence
HRRLGLNNPRH

SEQ ID NO: 6593 - protein, 11 aa, Artificial
  IGFBP-2 heparin binding domain-containing peptide sequence
KHHIGLNNPRH

SEQ ID NO: 6594 - protein, 11 aa, Artificial
  IGFBP-2 heparin binding domain-containing peptide sequence
RHHIGLNNPRH

SEQ ID NO: 6595 - protein, 11 aa, Artificial
  IGFBP-2 heparin binding domain-containing peptide sequence
HHHIGLNNPRH

SEQ ID NO: 6596 - protein, 11 aa, Artificial
  IGFBP-2 heparin binding domain-containing peptide sequence
KKHIGLNNPRH

SEQ ID NO: 6597 - protein, 11 aa, Artificial
  IGFBP-2 heparin binding domain-containing peptide sequence
RKHIGLNNPRH

SEQ ID NO: 6598 - protein, 11 aa, Artificial
  IGFBP-2 heparin binding domain-containing peptide sequence
HKHIGLNNPRH

SEQ ID NO: 6599 - protein, 11 aa, Artificial
  IGFBP-2 heparin binding domain-containing peptide sequence
KRHIGLNNPRH

SEQ ID NO: 6600 - protein, 11 aa, Artificial
  IGFBP-2 heparin binding domain-containing peptide sequence
RRHIGLNNPRH

SEQ ID NO: 6601 - protein, 11 aa, Artificial
  IGFBP-2 heparin binding domain-containing peptide sequence
HRHIGLNNPRH

SEQ ID NO: 6602 - protein, 11 aa, Artificial
  IGFBP-2 heparin binding domain-containing peptide sequence
KHKIGLNNPRH

SEQ ID NO: 6603 - protein, 11 aa, Artificial
  IGFBP-2 heparin binding domain-containing peptide sequence
RHKIGLNNPRH

SEQ ID NO: 6604 - protein, 11 aa, Artificial
  IGFBP-2 heparin binding domain-containing peptide sequence
HHKIGLNNPRH

SEQ ID NO: 6605 - protein, 11 aa, Artificial
  IGFBP-2 heparin binding domain-containing peptide sequence
KKKIGLNNPRH

SEQ ID NO: 6606 - protein, 11 aa, Artificial
  IGFBP-2 heparin binding domain-containing peptide sequence
RKKIGLNNPRH

SEQ ID NO: 6607 - protein, 11 aa, Artificial
  IGFBP-2 heparin binding domain-containing peptide sequence
HKKIGLNNPRH

SEQ ID NO: 6608 - protein, 11 aa, Artificial
  IGFBP-2 heparin binding domain-containing peptide sequence
KRKIGLNNPRH

SEQ ID NO: 6609 - protein, 11 aa, Artificial
  IGFBP-2 heparin binding domain-containing peptide sequence
RRKIGLNNPRH

SEQ ID NO: 6610 - protein, 11 aa, Artificial
  IGFBP-2 heparin binding domain-containing peptide sequence
HRKIGLNNPRH

SEQ ID NO: 6611 - protein, 11 aa, Artificial
  IGFBP-2 heparin binding domain-containing peptide sequence
KHRIGLNNPRH

SEQ ID NO: 6612 - protein, 11 aa, Artificial
  IGFBP-2 heparin binding domain-containing peptide sequence
RHRIGLNNPRH

SEQ ID NO: 6613 - protein, 11 aa, Artificial
  IGFBP-2 heparin binding domain-containing peptide sequence
HHRIGLNNPRH

SEQ ID NO: 6614 - protein, 11 aa, Artificial
  IGFBP-2 heparin binding domain-containing peptide sequence
KKRIGLNNPRH

SEQ ID NO: 6615 - protein, 11 aa, Artificial
  IGFBP-2 heparin binding domain-containing peptide sequence
RKRIGLNNPRH

SEQ ID NO: 6616 - protein, 11 aa, Artificial
  IGFBP-2 heparin binding domain-containing peptide sequence
HKRIGLNNPRH

SEQ ID NO: 6617 - protein, 11 aa, Artificial
  IGFBP-2 heparin binding domain-containing peptide sequence
KRRIGLNNPRH

SEQ ID NO: 6618 - protein, 11 aa, Artificial
  IGFBP-2 heparin binding domain-containing peptide sequence
RRRIGLNNPRH

SEQ ID NO: 6619 - protein, 11 aa, Artificial
  IGFBP-2 heparin binding domain-containing peptide sequence
HRRIGLNNPRH

SEQ ID NO: 6620 - protein, 11 aa, Artificial
  IGFBP-2 heparin binding domain-containing peptide sequence
KHHVGLNNPRH

SEQ ID NO: 6621 - protein, 11 aa, Artificial
  IGFBP-2 heparin binding domain-containing peptide sequence
RHHVGLNNPRH

SEQ ID NO: 6622 - protein, 11 aa, Artificial
  IGFBP-2 heparin binding domain-containing peptide sequence
HHHVGLNNPRH

SEQ ID NO: 6623 - protein, 11 aa, Artificial
  IGFBP-2 heparin binding domain-containing peptide sequence
KKHVGLNNPRH

SEQ ID NO: 6624 - protein, 11 aa, Artificial
  IGFBP-2 heparin binding domain-containing peptide sequence
RKHVGLNNPRH

SEQ ID NO: 6625 - protein, 11 aa, Artificial
  IGFBP-2 heparin binding domain-containing peptide sequence
HKHVGLNNPRH

SEQ ID NO: 6626 - protein, 11 aa, Artificial
  IGFBP-2 heparin binding domain-containing peptide sequence
KRHVGLNNPRH

SEQ ID NO: 6627 - protein, 11 aa, Artificial
  IGFBP-2 heparin binding domain-containing peptide sequence
RRHVGLNNPRH

SEQ ID NO: 6628 - protein, 11 aa, Artificial
  IGFBP-2 heparin binding domain-containing peptide sequence
HRHVGLNNPRH

SEQ ID NO: 6629 - protein, 11 aa, Artificial
  IGFBP-2 heparin binding domain-containing peptide sequence
KHKVGLNNPRH

SEQ ID NO: 6630 - protein, 11 aa, Artificial
  IGFBP-2 heparin binding domain-containing peptide sequence
RHKVGLNNPRH

SEQ ID NO: 6631 - protein, 11 aa, Artificial
  IGFBP-2 heparin binding domain-containing peptide sequence
HHKVGLNNPRH

SEQ ID NO: 6632 - protein, 11 aa, Artificial
  IGFBP-2 heparin binding domain-containing peptide sequence
KKKVGLNNPRH

SEQ ID NO: 6633 - protein, 11 aa, Artificial
  IGFBP-2 heparin binding domain-containing peptide sequence
RKKVGLNNPRH

SEQ ID NO: 6634 - protein, 11 aa, Artificial
  IGFBP-2 heparin binding domain-containing peptide sequence
HKKVGLNNPRH

SEQ ID NO: 6635 - protein, 11 aa, Artificial
  IGFBP-2 heparin binding domain-containing peptide sequence
KRKVGLNNPRH

SEQ ID NO: 6636 - protein, 11 aa, Artificial
  IGFBP-2 heparin binding domain-containing peptide sequence
RRKVGLNNPRH

SEQ ID NO: 6637 - protein, 11 aa, Artificial
  IGFBP-2 heparin binding domain-containing peptide sequence
HRKVGLNNPRH

SEQ ID NO: 6638 - protein, 11 aa, Artificial
  IGFBP-2 heparin binding domain-containing peptide sequence
KHRVGLNNPRH

SEQ ID NO: 6639 - protein, 11 aa, Artificial
  IGFBP-2 heparin binding domain-containing peptide sequence
RHRVGLNNPRH

SEQ ID NO: 6640 - protein, 11 aa, Artificial
  IGFBP-2 heparin binding domain-containing peptide sequence
HHRVGLNNPRH

SEQ ID NO: 6641 - protein, 11 aa, Artificial
  IGFBP-2 heparin binding domain-containing peptide sequence
KKRVGLNNPRH

SEQ ID NO: 6642 - protein, 11 aa, Artificial
  IGFBP-2 heparin binding domain-containing peptide sequence
RKRVGLNNPRH

SEQ ID NO: 6643 - protein, 11 aa, Artificial
  IGFBP-2 heparin binding domain-containing peptide sequence
HKRVGLNNPRH

SEQ ID NO: 6644 - protein, 11 aa, Artificial
  IGFBP-2 heparin binding domain-containing peptide sequence
KRRVGLNNPRH

SEQ ID NO: 6645 - protein, 11 aa, Artificial
  IGFBP-2 heparin binding domain-containing peptide sequence
RRRVGLNNPRH

SEQ ID NO: 6646 - protein, 11 aa, Artificial
  IGFBP-2 heparin binding domain-containing peptide sequence
HRRVGLNNPRH

SEQ ID NO: 6647 - protein, 11 aa, Artificial
  IGFBP-2 heparin binding domain-containing peptide sequence
KHHLGINNPRH

SEQ ID NO: 6648 - protein, 11 aa, Artificial
  IGFBP-2 heparin binding domain-containing peptide sequence
RHHLGINNPRH

SEQ ID NO: 6649 - protein, 11 aa, Artificial
  IGFBP-2 heparin binding domain-containing peptide sequence
HHHLGINNPRH

SEQ ID NO: 6650 - protein, 11 aa, Artificial
  IGFBP-2 heparin binding domain-containing peptide sequence
KKHLGINNPRH

SEQ ID NO: 6651 - protein, 11 aa, Artificial
  IGFBP-2 heparin binding domain-containing peptide sequence
RKHLGINNPRH

SEQ ID NO: 6652 - protein, 11 aa, Artificial
  IGFBP-2 heparin binding domain-containing peptide sequence
HKHLGINNPRH

SEQ ID NO: 6653 - protein, 11 aa, Artificial
  IGFBP-2 heparin binding domain-containing peptide sequence
KRHLGINNPRH

SEQ ID NO: 6654 - protein, 11 aa, Artificial
  IGFBP-2 heparin binding domain-containing peptide sequence
RRHLGINNPRH

SEQ ID NO: 6655 - protein, 11 aa, Artificial
  IGFBP-2 heparin binding domain-containing peptide sequence
HRHLGINNPRH

SEQ ID NO: 6656 - protein, 11 aa, Artificial
  IGFBP-2 heparin binding domain-containing peptide sequence
KHKLGINNPRH

SEQ ID NO: 6657 - protein, 11 aa, Artificial
  IGFBP-2 heparin binding domain-containing peptide sequence
RHKLGINNPRH

SEQ ID NO: 6658 - protein, 11 aa, Artificial
  IGFBP-2 heparin binding domain-containing peptide sequence
HHKLGINNPRH

SEQ ID NO: 6659 - protein, 11 aa, Artificial
  IGFBP-2 heparin binding domain-containing peptide sequence
KKKLGINNPRH

SEQ ID NO: 6660 - protein, 11 aa, Artificial
  IGFBP-2 heparin binding domain-containing peptide sequence
RKKLGINNPRH

SEQ ID NO: 6661 - protein, 11 aa, Artificial
  IGFBP-2 heparin binding domain-containing peptide sequence
HKKLGINNPRH

SEQ ID NO: 6662 - protein, 11 aa, Artificial
  IGFBP-2 heparin binding domain-containing peptide sequence
KRKLGINNPRH

SEQ ID NO: 6663 - protein, 11 aa, Artificial
  IGFBP-2 heparin binding domain-containing peptide sequence
RRKLGINNPRH

SEQ ID NO: 6664 - protein, 11 aa, Artificial
  IGFBP-2 heparin binding domain-containing peptide sequence
HRKLGINNPRH

SEQ ID NO: 6665 - protein, 11 aa, Artificial
  IGFBP-2 heparin binding domain-containing peptide sequence
KHRLGINNPRH

SEQ ID NO: 6666 - protein, 11 aa, Artificial
  IGFBP-2 heparin binding domain-containing peptide sequence
RHRLGINNPRH

SEQ ID NO: 6667 - protein, 11 aa, Artificial
  IGFBP-2 heparin binding domain-containing peptide sequence
HHRLGINNPRH

SEQ ID NO: 6668 - protein, 11 aa, Artificial
  IGFBP-2 heparin binding domain-containing peptide sequence
KKRLGINNPRH

SEQ ID NO: 6669 - protein, 11 aa, Artificial
  IGFBP-2 heparin binding domain-containing peptide sequence
RKRLGINNPRH

SEQ ID NO: 6670 - protein, 11 aa, Artificial
  IGFBP-2 heparin binding domain-containing peptide sequence
HKRLGINNPRH

SEQ ID NO: 6671 - protein, 11 aa, Artificial
  IGFBP-2 heparin binding domain-containing peptide sequence
KRRLGINNPRH

SEQ ID NO: 6672 - protein, 11 aa, Artificial
  IGFBP-2 heparin binding domain-containing peptide sequence
RRRLGINNPRH

SEQ ID NO: 6673 - protein, 11 aa, Artificial
  IGFBP-2 heparin binding domain-containing peptide sequence
HRRLGINNPRH

SEQ ID NO: 6674 - protein, 11 aa, Artificial
  IGFBP-2 heparin binding domain-containing peptide sequence
KHHIGIENPRH

SEQ ID NO: 6675 - protein, 11 aa, Artificial
  IGFBP-2 heparin binding domain-containing peptide sequence
RHHIGINNPRH

SEQ ID NO: 6676 - protein, 11 aa, Artificial
  IGFBP-2 heparin binding domain-containing peptide sequence
HHHIGINNPRH

SEQ ID NO: 6677 - protein, 11 aa, Artificial
  IGFBP-2 heparin binding domain-containing peptide sequence
KKHIGINNPRH

SEQ ID NO: 6678 - protein, 11 aa, Artificial
  IGFBP-2 heparin binding domain-containing peptide sequence
RKHIGINNPRH

SEQ ID NO: 6679 - protein, 11 aa, Artificial
  IGFBP-2 heparin binding domain-containing peptide sequence
HKHIGINNPRH

SEQ ID NO: 6680 - protein, 11 aa, Artificial
  IGFBP-2 heparin binding domain-containing peptide sequence
KRHIGINNPRH

SEQ ID NO: 6681 - protein, 11 aa, Artificial
  IGFBP-2 heparin binding domain-containing peptide sequence
RRHIGINNPRH

SEQ ID NO: 6682 - protein, 11 aa, Artificial
  IGFBP-2 heparin binding domain-containing peptide sequence
HRHIGINNPRH

SEQ ID NO: 6683 - protein, 11 aa, Artificial
  IGFBP-2 heparin binding domain-containing peptide sequence
KHKIGINNPRH

SEQ ID NO: 6684 - protein, 11 aa, Artificial
  IGFBP-2 heparin binding domain-containing peptide sequence
RHKIGINNPRH

SEQ ID NO: 6685 - protein, 11 aa, Artificial
  IGFBP-2 heparin binding domain-containing peptide sequence
HHKIGINNPRH

SEQ ID NO: 6686 - protein, 11 aa, Artificial
  IGFBP-2 heparin binding domain-containing peptide sequence
KKKIGINNPRH

SEQ ID NO: 6687 - protein, 11 aa, Artificial
  IGFBP-2 heparin binding domain-containing peptide sequence
RKKIGINNPRH

SEQ ID NO: 6688 - protein, 11 aa, Artificial
  IGFBP-2 heparin binding domain-containing peptide sequence
HKKIGINNPRH

SEQ ID NO: 6689 - protein, 11 aa, Artificial
  IGFBP-2 heparin binding domain-containing peptide sequence
KRKIGINNPRH

SEQ ID NO: 6690 - protein, 11 aa, Artificial
  IGFBP-2 heparin binding domain-containing peptide sequence
RRKIGINNPRH

SEQ ID NO: 6691 - protein, 11 aa, Artificial
  IGFBP-2 heparin binding domain-containing peptide sequence
HRKIGINNPRH

SEQ ID NO: 6692 - protein, 11 aa, Artificial
  IGFBP-2 heparin binding domain-containing peptide sequence
KHRIGINNPRH

SEQ ID NO: 6693 - protein, 11 aa, Artificial
  IGFBP-2 heparin binding domain-containing peptide sequence
RHRIGINNPRH

SEQ ID NO: 6694 - protein, 11 aa, Artificial
  IGFBP-2 heparin binding domain-containing peptide sequence
HHRIGINNPRH

SEQ ID NO: 6695 - protein, 11 aa, Artificial
  IGFBP-2 heparin binding domain-containing peptide sequence
KKRIGINNPRH

SEQ ID NO: 6696 - protein, 11 aa, Artificial
  IGFBP-2 heparin binding domain-containing peptide sequence
RKRIGINNPRH

SEQ ID NO: 6697 - protein, 11 aa, Artificial
  IGFBP-2 heparin binding domain-containing peptide sequence
HKRIGINNPRH

SEQ ID NO: 6698 - protein, 11 aa, Artificial
  IGFBP-2 heparin binding domain-containing peptide sequence
KRRIGINNPRH

SEQ ID NO: 6699 - protein, 11 aa, Artificial
  IGFBP-2 heparin binding domain-containing peptide sequence
RRRIGINNPRH

SEQ ID NO: 6700 - protein, 11 aa, Artificial
  IGFBP-2 heparin binding domain-containing peptide sequence
HRRIGINNPRH

SEQ ID NO: 6701 - protein, 11 aa, Artificial
  IGFBP-2 heparin binding domain-containing peptide sequence
KHHVGINNPRH

SEQ ID NO: 6702 - protein, 11 aa, Artificial
  IGFBP-2 heparin binding domain-containing peptide sequence
RHHVGINNPRH

SEQ ID NO: 6703 - protein, 11 aa, Artificial
  IGFBP-2 heparin binding domain-containing peptide sequence
HHHVGINNPRH

SEQ ID NO: 6704 - protein, 11 aa, Artificial
  IGFBP-2 heparin binding domain-containing peptide sequence
KKHVGINNPRH

SEQ ID NO: 6705 - protein, 11 aa, Artificial
  IGFBP-2 heparin binding domain-containing peptide sequence
RKHVGINNPRH

SEQ ID NO: 6706 - protein, 11 aa, Artificial
  IGFBP-2 heparin binding domain-containing peptide sequence
HKHVGINNPRH

SEQ ID NO: 6707 - protein, 11 aa, Artificial
  IGFBP-2 heparin binding domain-containing peptide sequence
KRHVGINNPRH

SEQ ID NO: 6708 - protein, 11 aa, Artificial
  IGFBP-2 heparin binding domain-containing peptide sequence
RRHVGINNPRH

SEQ ID NO: 6709 - protein, 11 aa, Artificial
  IGFBP-2 heparin binding domain-containing peptide sequence
HRHVGINNPRH

SEQ ID NO: 6710 - protein, 11 aa, Artificial
  IGFBP-2 heparin binding domain-containing peptide sequence
KHKVGINNPRH

SEQ ID NO: 6711 - protein, 11 aa, Artificial
  IGFBP-2 heparin binding domain-containing peptide sequence
RHKVGINNPRH

SEQ ID NO: 6712 - protein, 11 aa, Artificial
  IGFBP-2 heparin binding domain-containing peptide sequence
HHKVGINNPRH

SEQ ID NO: 6713 - protein, 11 aa, Artificial
  IGFBP-2 heparin binding domain-containing peptide sequence
KKKVGINNPRH

SEQ ID NO: 6714 - protein, 11 aa, Artificial
  IGFBP-2 heparin binding domain-containing peptide sequence
RKKVGINNPRH

SEQ ID NO: 6715 - protein, 11 aa, Artificial
  IGFBP-2 heparin binding domain-containing peptide sequence
HKKVGINNPRH

SEQ ID NO: 6716 - protein, 11 aa, Artificial
  IGFBP-2 heparin binding domain-containing peptide sequence
KRKVGINNPRH

SEQ ID NO: 6717 - protein, 11 aa, Artificial
  IGFBP-2 heparin binding domain-containing peptide sequence
RRKVGINNPRH

SEQ ID NO: 6718 - protein, 11 aa, Artificial
  IGFBP-2 heparin binding domain-containing peptide sequence
HRKVGINNPRH

SEQ ID NO: 6719 - protein, 11 aa, Artificial
  IGFBP-2 heparin binding domain-containing peptide sequence
KHRVGINNPRH

SEQ ID NO: 6720 - protein, 11 aa, Artificial
  IGFBP-2 heparin binding domain-containing peptide sequence
RHRVGINNPRH

SEQ ID NO: 6721 - protein, 11 aa, Artificial
  IGFBP-2 heparin binding domain-containing peptide sequence
HHRVGINNPRH

SEQ ID NO: 6722 - protein, 11 aa, Artificial
  IGFBP-2 heparin binding domain-containing peptide sequence
KKRVGINNPRH

SEQ ID NO: 6723 - protein, 11 aa, Artificial
  IGFBP-2 heparin binding domain-containing peptide sequence
RKRVGINNPRH

SEQ ID NO: 6724 - protein, 11 aa, Artificial
  IGFBP-2 heparin binding domain-containing peptide sequence
HKRVGINNPRH

SEQ ID NO: 6725 - protein, 11 aa, Artificial
  IGFBP-2 heparin binding domain-containing peptide sequence
KRRVGINNPRH

SEQ ID NO: 6726 - protein, 11 aa, Artificial
  IGFBP-2 heparin binding domain-containing peptide sequence
RRRVGINNPRH

SEQ ID NO: 6727 - protein, 11 aa, Artificial
  IGFBP-2 heparin binding domain-containing peptide sequence
HRRVGINNPRH

SEQ ID NO: 6728 - protein, 11 aa, Artificial
  IGFBP-2 heparin binding domain-containing peptide sequence
KHHLGVNNPRH

SEQ ID NO: 6729 - protein, 11 aa, Artificial
  IGFBP-2 heparin binding domain-containing peptide sequence
RHHLGVNNPRH

SEQ ID NO: 6730 - protein, 11 aa, Artificial
  IGFBP-2 heparin binding domain-containing peptide sequence
HHHLGVNNPRH

SEQ ID NO: 6731 - protein, 11 aa, Artificial
  IGFBP-2 heparin binding domain-containing peptide sequence
KKHLGVNNPRH

SEQ ID NO: 6732 - protein, 11 aa, Artificial
  IGFBP-2 heparin binding domain-containing peptide sequence
RKHLGVNNPRH

SEQ ID NO: 6733 - protein, 11 aa, Artificial
  IGFBP-2 heparin binding domain-containing peptide sequence
HKHLGVNNPRH

SEQ ID NO: 6734 - protein, 11 aa, Artificial
  IGFBP-2 heparin binding domain-containing peptide sequence
KRHLGVNNPRH

SEQ ID NO: 6735 - protein, 11 aa, Artificial
  IGFBP-2 heparin binding domain-containing peptide sequence
RRHLGVNNPRH

SEQ ID NO: 6736 - protein, 11 aa, Artificial
  IGFBP-2 heparin binding domain-containing peptide sequence
HRHLGVNNPRH

SEQ ID NO: 6737 - protein, 11 aa, Artificial
  IGFBP-2 heparin binding domain-containing peptide sequence
KHKLGVNNPRH

SEQ ID NO: 6738 - protein, 11 aa, Artificial
  IGFBP-2 heparin binding domain-containing peptide sequence
RHKLGVNNPRH

SEQ ID NO: 6739 - protein, 11 aa, Artificial
  IGFBP-2 heparin binding domain-containing peptide sequence
HHKLGVNNPRH

SEQ ID NO: 6740 - protein, 11 aa, Artificial
  IGFBP-2 heparin binding domain-containing peptide sequence
KKKLGVNNPRH

SEQ ID NO: 6741 - protein, 11 aa, Artificial
  IGFBP-2 heparin binding domain-containing peptide sequence
RKKLGVNNPRH

SEQ ID NO: 6742 - protein, 11 aa, Artificial
  IGFBP-2 heparin binding domain-containing peptide sequence
HKKLGVNNPRH

SEQ ID NO: 6743 - protein, 11 aa, Artificial
  IGFBP-2 heparin binding domain-containing peptide sequence
KRKLGVNNPRH

SEQ ID NO: 6744 - protein, 11 aa, Artificial
  IGFBP-2 heparin binding domain-containing peptide sequence
RRKLGVNNPRH

SEQ ID NO: 6745 - protein, 11 aa, Artificial
  IGFBP-2 heparin binding domain-containing peptide sequence
HRKLGVNNPRH

SEQ ID NO: 6746 - protein, 11 aa, Artificial
  IGFBP-2 heparin binding domain-containing peptide sequence
KHRLGVNNPRH

SEQ ID NO: 6747 - protein, 11 aa, Artificial
  IGFBP-2 heparin binding domain-containing peptide sequence
RHRLGVNNPRH

SEQ ID NO: 6748 - protein, 11 aa, Artificial
  IGFBP-2 heparin binding domain-containing peptide sequence
HHRLGVNNPRH

SEQ ID NO: 6749 - protein, 11 aa, Artificial
  IGFBP-2 heparin binding domain-containing peptide sequence
KKRLGVNNPRH

SEQ ID NO: 6750 - protein, 11 aa, Artificial
  IGFBP-2 heparin binding domain-containing peptide sequence
RKRLGVNNPRH

SEQ ID NO: 6751 - protein, 11 aa, Artificial
  IGFBP-2 heparin binding domain-containing peptide sequence
HKRLGVNNPRH

SEQ ID NO: 6752 - protein, 11 aa, Artificial
  IGFBP-2 heparin binding domain-containing peptide sequence
KRRLGVNNPRH

SEQ ID NO: 6753 - protein, 11 aa, Artificial
  IGFBP-2 heparin binding domain-containing peptide sequence
RRRLGVNNPRH

SEQ ID NO: 6754 - protein, 11 aa, Artificial
  IGFBP-2 heparin binding domain-containing peptide sequence
HRRLGVNNPRH

SEQ ID NO: 6755 - protein, 11 aa, Artificial
  IGFBP-2 heparin binding domain-containing peptide sequence
KHHIGVNNPRH

SEQ ID NO: 6756 - protein, 11 aa, Artificial
  IGFBP-2 heparin binding domain-containing peptide sequence
RHHIGVNNPRH

SEQ ID NO: 6757 - protein, 11 aa, Artificial
  IGFBP-2 heparin binding domain-containing peptide sequence
HHHIGVNNPRH

SEQ ID NO: 6758 - protein, 11 aa, Artificial
  IGFBP-2 heparin binding domain-containing peptide sequence
KKHIGVNNPRH

SEQ ID NO: 6759 - protein, 11 aa, Artificial
  IGFBP-2 heparin binding domain-containing peptide sequence
RKHIGVNNPRH

SEQ ID NO: 6760 - protein, 11 aa, Artificial
  IGFBP-2 heparin binding domain-containing peptide sequence
HKHIGVNNPRH

SEQ ID NO: 6761 - protein, 11 aa, Artificial
  IGFBP-2 heparin binding domain-containing peptide sequence
KRHIGVNNPRH

SEQ ID NO: 6762 - protein, 11 aa, Artificial
  IGFBP-2 heparin binding domain-containing peptide sequence
RRHIGVNNPRH

SEQ ID NO: 6763 - protein, 11 aa, Artificial
  IGFBP-2 heparin binding domain-containing peptide sequence
HRHIGVNNPRH

SEQ ID NO: 6764 - protein, 11 aa, Artificial
  IGFBP-2 heparin binding domain-containing peptide sequence
KHKIGVNNPRH

SEQ ID NO: 6765 - protein, 11 aa, Artificial
  IGFBP-2 heparin binding domain-containing peptide sequence
RHKIGVNNPRH

SEQ ID NO: 6766 - protein, 11 aa, Artificial
  IGFBP-2 heparin binding domain-containing peptide sequence
HHKIGVNNPRH

SEQ ID NO: 6767 - protein, 11 aa, Artificial
  IGFBP-2 heparin binding domain-containing peptide sequence
KKKIGVNNPRH

SEQ ID NO: 6768 - protein, 11 aa, Artificial
  IGFBP-2 heparin binding domain-containing peptide sequence
RKKIGVNNPRH

SEQ ID NO: 6769 - protein, 11 aa, Artificial
  IGFBP-2 heparin binding domain-containing peptide sequence
HKKIGVNNPRH

SEQ ID NO: 6770 - protein, 11 aa, Artificial
  IGFBP-2 heparin binding domain-containing peptide sequence
KRKIGVNNPRH

SEQ ID NO: 6771 - protein, 11 aa, Artificial
  IGFBP-2 heparin binding domain-containing peptide sequence
RRKIGVNNPRH

SEQ ID NO: 6772 - protein, 11 aa, Artificial
  IGFBP-2 heparin binding domain-containing peptide sequence
HRKIGVNNPRH

SEQ ID NO: 6773 - protein, 11 aa, Artificial
  IGFBP-2 heparin binding domain-containing peptide sequence
KHRIGVNNPRH

SEQ ID NO: 6774 - protein, 11 aa, Artificial
  IGFBP-2 heparin binding domain-containing peptide sequence
RHRIGVNNPRH

SEQ ID NO: 6775 - protein, 11 aa, Artificial
  IGFBP-2 heparin binding domain-containing peptide sequence
HHRIGVNNPRH

SEQ ID NO: 6776 - protein, 11 aa, Artificial
  IGFBP-2 heparin binding domain-containing peptide sequence
KKRIGVNNPRH

SEQ ID NO: 6777 - protein, 11 aa, Artificial
  IGFBP-2 heparin binding domain-containing peptide sequence
RKRIGVNNPRH

SEQ ID NO: 6778 - protein, 11 aa, Artificial
  IGFBP-2 heparin binding domain-containing peptide sequence
HKRIGVNNPRH

SEQ ID NO: 6779 - protein, 11 aa, Artificial
  IGFBP-2 heparin binding domain-containing peptide sequence
KRRIGVNNPRH

SEQ ID NO: 6780 - protein, 11 aa, Artificial
  IGFBP-2 heparin binding domain-containing peptide sequence
RRRIGVNNPRH

SEQ ID NO: 6781 - protein, 11 aa, Artificial
  IGFBP-2 heparin binding domain-containing peptide sequence
HRRIGVNNPRH

SEQ ID NO: 6782 - protein, 11 aa, Artificial
  IGFBP-2 heparin binding domain-containing peptide sequence
KHHVGVNNPRH

SEQ ID NO: 6783 - protein, 11 aa, Artificial
  IGFBP-2 heparin binding domain-containing peptide sequence
RHHVGVNNPRH

SEQ ID NO: 6784 - protein, 11 aa, Artificial
  IGFBP-2 heparin binding domain-containing peptide sequence
HHHVGVNNPRH

SEQ ID NO: 6785 - protein, 11 aa, Artificial
  IGFBP-2 heparin binding domain-containing peptide sequence
KKHVGVNNPRH

SEQ ID NO: 6786 - protein, 11 aa, Artificial
  IGFBP-2 heparin binding domain-containing peptide sequence
RKHVGVNNPRH

SEQ ID NO: 6787 - protein, 11 aa, Artificial
  IGFBP-2 heparin binding domain-containing peptide sequence
HKHVGVNNPRH

SEQ ID NO: 6788 - protein, 11 aa, Artificial
  IGFBP-2 heparin binding domain-containing peptide sequence
KRHVGVNNPRH

SEQ ID NO: 6789 - protein, 11 aa, Artificial
  IGFBP-2 heparin binding domain-containing peptide sequence
RRHVGVNNPRH

SEQ ID NO: 6790 - protein, 11 aa, Artificial
  IGFBP-2 heparin binding domain-containing peptide sequence
HRHVGVNNPRH

SEQ ID NO: 6791 - protein, 11 aa, Artificial
  IGFBP-2 heparin binding domain-containing peptide sequence
KHKVGVNNPRH

SEQ ID NO: 6792 - protein, 11 aa, Artificial
  IGFBP-2 heparin binding domain-containing peptide sequence
RHKVGVNNPRH

SEQ ID NO: 6793 - protein, 11 aa, Artificial
  IGFBP-2 heparin binding domain-containing peptide sequence
HHKVGVNNPRH

SEQ ID NO: 6794 - protein, 11 aa, Artificial
  IGFBP-2 heparin binding domain-containing peptide sequence
KKKVGVNNPRH

SEQ ID NO: 6795 - protein, 11 aa, Artificial
  IGFBP-2 heparin binding domain-containing peptide sequence
RKKVGVNNPRH

SEQ ID NO: 6796 - protein, 11 aa, Artificial
  IGFBP-2 heparin binding domain-containing peptide sequence
HKKVGVNNPRH

SEQ ID NO: 6797 - protein, 11 aa, Artificial
  IGFBP-2 heparin binding domain-containing peptide sequence
KRKVGVNNPRH

SEQ ID NO: 6798 - protein, 11 aa, Artificial
  IGFBP-2 heparin binding domain-containing peptide sequence
RRKVGVNNPRH

SEQ ID NO: 6799 - protein, 11 aa, Artificial
  IGFBP-2 heparin binding domain-containing peptide sequence
HRKVGVNNPRH

SEQ ID NO: 6800 - protein, 11 aa, Artificial
  IGFBP-2 heparin binding domain-containing peptide sequence
KHRVGVNNPRH

SEQ ID NO: 6801 - protein, 11 aa, Artificial
  IGFBP-2 heparin binding domain-containing peptide sequence
RHRVGVNNPRH

SEQ ID NO: 6802 - protein, 11 aa, Artificial
  IGFBP-2 heparin binding domain-containing peptide sequence
HHRVGVNNPRH

SEQ ID NO: 6803 - protein, 11 aa, Artificial
  IGFBP-2 heparin binding domain-containing peptide sequence
KKRVGVNNPRH

SEQ ID NO: 6804 - protein, 11 aa, Artificial
  IGFBP-2 heparin binding domain-containing peptide sequence
RKRVGVNNPRH

SEQ ID NO: 6805 - protein, 11 aa, Artificial
  IGFBP-2 heparin binding domain-containing peptide sequence
HKRVGVNNPRH

SEQ ID NO: 6806 - protein, 11 aa, Artificial
  IGFBP-2 heparin binding domain-containing peptide sequence
KRRVGVNNPRH

SEQ ID NO: 6807 - protein, 11 aa, Artificial
  IGFBP-2 heparin binding domain-containing peptide sequence
RRRVGVNNPRH

SEQ ID NO: 6808 - protein, 11 aa, Artificial
  IGFBP-2 heparin binding domain-containing peptide sequence
HRRVGVNNPRH

SEQ ID NO: 6809 - protein, 11 aa, Artificial
  IGFBP-2 heparin binding domain-containing peptide sequence
KHHLGLEEPHR

SEQ ID NO: 6810 - protein, 11 aa, Artificial
  IGFBP-2 heparin binding domain-containing peptide sequence
RHHLGLEEPHR

SEQ ID NO: 6811 - protein, 11 aa, Artificial
  IGFBP-2 heparin binding domain-containing peptide sequence
HHHLGLEEPHR

SEQ ID NO: 6812 - protein, 11 aa, Artificial
  IGFBP-2 heparin binding domain-containing peptide sequence
KKHLGLEEPHR

SEQ ID NO: 6813 - protein, 11 aa, Artificial
  IGFBP-2 heparin binding domain-containing peptide sequence
RKHLGLEEPHR

SEQ ID NO: 6814 - protein, 11 aa, Artificial
  IGFBP-2 heparin binding domain-containing peptide sequence
HKHLGLEEPHR

SEQ ID NO: 6815 - protein, 11 aa, Artificial
  IGFBP-2 heparin binding domain-containing peptide sequence
KRHLGLEEPHR

SEQ ID NO: 6816 - protein, 11 aa, Artificial
  IGFBP-2 heparin binding domain-containing peptide sequence
RRHLGLEEPHR

SEQ ID NO: 6817 - protein, 11 aa, Artificial
  IGFBP-2 heparin binding domain-containing peptide sequence
HRHLGLEEPHR

SEQ ID NO: 6818 - protein, 11 aa, Artificial
  IGFBP-2 heparin binding domain-containing peptide sequence
KHKLGLEEPHR

SEQ ID NO: 6819 - protein, 11 aa, Artificial
  IGFBP-2 heparin binding domain-containing peptide sequence
RHKLGLEEPHR

SEQ ID NO: 6820 - protein, 11 aa, Artificial
  IGFBP-2 heparin binding domain-containing peptide sequence
HHKLGLEEPHR

SEQ ID NO: 6821 - protein, 11 aa, Artificial
  IGFBP-2 heparin binding domain-containing peptide sequence
KKKLGLEEPHR

SEQ ID NO: 6822 - protein, 11 aa, Artificial
  IGFBP-2 heparin binding domain-containing peptide sequence
RKKLGLEEPHR

SEQ ID NO: 6823 - protein, 11 aa, Artificial
  IGFBP-2 heparin binding domain-containing peptide sequence
HKKLGLEEPHR

SEQ ID NO: 6824 - protein, 11 aa, Artificial
  IGFBP-2 heparin binding domain-containing peptide sequence
KRKLGLEEPHR

SEQ ID NO: 6825 - protein, 11 aa, Artificial
  IGFBP-2 heparin binding domain-containing peptide sequence
RRKLGLEEPHR

SEQ ID NO: 6826 - protein, 11 aa, Artificial
  IGFBP-2 heparin binding domain-containing peptide sequence
HRKLGLEEPHR

SEQ ID NO: 6827 - protein, 11 aa, Artificial
  IGFBP-2 heparin binding domain-containing peptide sequence
KHRLGLEEPHR

SEQ ID NO: 6828 - protein, 11 aa, Artificial
  IGFBP-2 heparin binding domain-containing peptide sequence
RHRLGLEEPHR

SEQ ID NO: 6829 - protein, 11 aa, Artificial
  IGFBP-2 heparin binding domain-containing peptide sequence
HHRLGLEEPHR

SEQ ID NO: 6830 - protein, 11 aa, Artificial
  IGFBP-2 heparin binding domain-containing peptide sequence
KKRLGLEEPHR

SEQ ID NO: 6831 - protein, 11 aa, Artificial
  IGFBP-2 heparin binding domain-containing peptide sequence
RKRLGLEEPHR

SEQ ID NO: 6832 - protein, 11 aa, Artificial
  IGFBP-2 heparin binding domain-containing peptide sequence
HKRLGLEEPHR

SEQ ID NO: 6833 - protein, 11 aa, Artificial
  IGFBP-2 heparin binding domain-containing peptide sequence
KRRLGLEEPHR

SEQ ID NO: 6834 - protein, 11 aa, Artificial
  IGFBP-2 heparin binding domain-containing peptide sequence
RRRLGLEEPHR

SEQ ID NO: 6835 - protein, 11 aa, Artificial
  IGFBP-2 heparin binding domain-containing peptide sequence
HRRLGLEEPHR

SEQ ID NO: 6836 - protein, 11 aa, Artificial
  IGFBP-2 heparin binding domain-containing peptide sequence
KHHIGLEEPHR

SEQ ID NO: 6837 - protein, 11 aa, Artificial
  IGFBP-2 heparin binding domain-containing peptide sequence
RHHIGLEEPHR

SEQ ID NO: 6838 - protein, 11 aa, Artificial
  IGFBP-2 heparin binding domain-containing peptide sequence
HHHIGLEEPHR

SEQ ID NO: 6839 - protein, 11 aa, Artificial
  IGFBP-2 heparin binding domain-containing peptide sequence
KKHIGLEEPHR

SEQ ID NO: 6840 - protein, 11 aa, Artificial
  IGFBP-2 heparin binding domain-containing peptide sequence
RKHIGLEEPHR

SEQ ID NO: 6841 - protein, 11 aa, Artificial
  IGFBP-2 heparin binding domain-containing peptide sequence
HKHIGLEEPHR

SEQ ID NO: 6842 - protein, 11 aa, Artificial
  IGFBP-2 heparin binding domain-containing peptide sequence
KRHIGLEEPHR

SEQ ID NO: 6843 - protein, 11 aa, Artificial
  IGFBP-2 heparin binding domain-containing peptide sequence
RRHIGLEEPHR

SEQ ID NO: 6844 - protein, 11 aa, Artificial
  IGFBP-2 heparin binding domain-containing peptide sequence
HRHIGLEEPHR

SEQ ID NO: 6845 - protein, 11 aa, Artificial
  IGFBP-2 heparin binding domain-containing peptide sequence
KHKIGLEEPHR

SEQ ID NO: 6846 - protein, 11 aa, Artificial
  IGFBP-2 heparin binding domain-containing peptide sequence
RHKIGLEEPHR

SEQ ID NO: 6847 - protein, 11 aa, Artificial
  IGFBP-2 heparin binding domain-containing peptide sequence
HHKIGLEEPHR

SEQ ID NO: 6848 - protein, 11 aa, Artificial
  IGFBP-2 heparin binding domain-containing peptide sequence
KKKIGLEEPHR

SEQ ID NO: 6849 - protein, 11 aa, Artificial
  IGFBP-2 heparin binding domain-containing peptide sequence
RKKIGLEEPHR

SEQ ID NO: 6850 - protein, 11 aa, Artificial
  IGFBP-2 heparin binding domain-containing peptide sequence
HKKIGLEEPHR

SEQ ID NO: 6851 - protein, 11 aa, Artificial
  IGFBP-2 heparin binding domain-containing peptide sequence
KRKIGLEEPHR

SEQ ID NO: 6852 - protein, 11 aa, Artificial
  IGFBP-2 heparin binding domain-containing peptide sequence
RRKIGLEEPHR

SEQ ID NO: 6853 - protein, 11 aa, Artificial
  IGFBP-2 heparin binding domain-containing peptide sequence
HRKIGLEEPHR

SEQ ID NO: 6854 - protein, 11 aa, Artificial
  IGFBP-2 heparin binding domain-containing peptide sequence
KHRIGLEEPHR

SEQ ID NO: 6855 - protein, 11 aa, Artificial
  IGFBP-2 heparin binding domain-containing peptide sequence
RHRIGLEEPHR

SEQ ID NO: 6856 - protein, 11 aa, Artificial
  IGFBP-2 heparin binding domain-containing peptide sequence
HHRIGLEEPHR

SEQ ID NO: 6857 - protein, 11 aa, Artificial
  IGFBP-2 heparin binding domain-containing peptide sequence
KKRIGLEEPHR

SEQ ID NO: 6858 - protein, 11 aa, Artificial
  IGFBP-2 heparin binding domain-containing peptide sequence
RKRIGLEEPHR

SEQ ID NO: 6859 - protein, 11 aa, Artificial
  IGFBP-2 heparin binding domain-containing peptide sequence
HKRIGLEEPHR

SEQ ID NO: 6860 - protein, 11 aa, Artificial
  IGFBP-2 heparin binding domain-containing peptide sequence
KRRIGLEEPHR

SEQ ID NO: 6861 - protein, 11 aa, Artificial
  IGFBP-2 heparin binding domain-containing peptide sequence
RRRIGLEEPHR

SEQ ID NO: 6862 - protein, 11 aa, Artificial
  IGFBP-2 heparin binding domain-containing peptide sequence
HRRIGLEEPHR

SEQ ID NO: 6863 - protein, 11 aa, Artificial
  IGFBP-2 heparin binding domain-containing peptide sequence
KHHVGLEEPHR

SEQ ID NO: 6864 - protein, 11 aa, Artificial
  IGFBP-2 heparin binding domain-containing peptide sequence
RHHVGLEEPHR

SEQ ID NO: 6865 - protein, 11 aa, Artificial
  IGFBP-2 heparin binding domain-containing peptide sequence
HHHVGLEEPHR

SEQ ID NO: 6866 - protein, 11 aa, Artificial
  IGFBP-2 heparin binding domain-containing peptide sequence
KKHVGLEEPHR

SEQ ID NO: 6867 - protein, 11 aa, Artificial
  IGFBP-2 heparin binding domain-containing peptide sequence
RKHVGLEEPHR

SEQ ID NO: 6868 - protein, 11 aa, Artificial
  IGFBP-2 heparin binding domain-containing peptide sequence
HKHVGLEEPHR

SEQ ID NO: 6869 - protein, 11 aa, Artificial
  IGFBP-2 heparin binding domain-containing peptide sequence
KRHVGLEEPHR

SEQ ID NO: 6870 - protein, 11 aa, Artificial
  IGFBP-2 heparin binding domain-containing peptide sequence
RRHVGLEEPHR

SEQ ID NO: 6871 - protein, 11 aa, Artificial
  IGFBP-2 heparin binding domain-containing peptide sequence
HRHVGLEEPHR

SEQ ID NO: 6872 - protein, 11 aa, Artificial
  IGFBP-2 heparin binding domain-containing peptide sequence
KHKVGLEEPHR

SEQ ID NO: 6873 - protein, 11 aa, Artificial
  IGFBP-2 heparin binding domain-containing peptide sequence
RHKVGLEEPHR

SEQ ID NO: 6874 - protein, 11 aa, Artificial
  IGFBP-2 heparin binding domain-containing peptide sequence
HHKVGLEEPHR

SEQ ID NO: 6875 - protein, 11 aa, Artificial
  IGFBP-2 heparin binding domain-containing peptide sequence
KKKVGLEEPHR

SEQ ID NO: 6876 - protein, 11 aa, Artificial
  IGFBP-2 heparin binding domain-containing peptide sequence
RKKVGLEEPHR

SEQ ID NO: 6877 - protein, 11 aa, Artificial
  IGFBP-2 heparin binding domain-containing peptide sequence
HKKVGLEEPHR

SEQ ID NO: 6878 - protein, 11 aa, Artificial
  IGFBP-2 heparin binding domain-containing peptide sequence
KRKVGLEEPHR

SEQ ID NO: 6879 - protein, 11 aa, Artificial
  IGFBP-2 heparin binding domain-containing peptide sequence
RRKVGLEEPHR

SEQ ID NO: 6880 - protein, 11 aa, Artificial
  IGFBP-2 heparin binding domain-containing peptide sequence
HRKVGLEEPHR

SEQ ID NO: 6881 - protein, 11 aa, Artificial
  IGFBP-2 heparin binding domain-containing peptide sequence
KHRVGLEEPHR

SEQ ID NO: 6882 - protein, 11 aa, Artificial
  IGFBP-2 heparin binding domain-containing peptide sequence
RHRVGLEEPHR

SEQ ID NO: 6883 - protein, 11 aa, Artificial
  IGFBP-2 heparin binding domain-containing peptide sequence
HHRVGLEEPHR

SEQ ID NO: 6884 - protein, 11 aa, Artificial
  IGFBP-2 heparin binding domain-containing peptide sequence
KKRVGLEEPHR

SEQ ID NO: 6885 - protein, 11 aa, Artificial
  IGFBP-2 heparin binding domain-containing peptide sequence
RKRVGLEEPHR

SEQ ID NO: 6886 - protein, 11 aa, Artificial
  IGFBP-2 heparin binding domain-containing peptide sequence
HKRVGLEEPHR

SEQ ID NO: 6887 - protein, 11 aa, Artificial
  IGFBP-2 heparin binding domain-containing peptide sequence
KRRVGLEEPHR

SEQ ID NO: 6888 - protein, 11 aa, Artificial
  IGFBP-2 heparin binding domain-containing peptide sequence
RRRVGLEEPHR

SEQ ID NO: 6889 - protein, 11 aa, Artificial
  IGFBP-2 heparin binding domain-containing peptide sequence
HRRVGLEEPHR

SEQ ID NO: 6890 - protein, 11 aa, Artificial
  IGFBP-2 heparin binding domain-containing peptide sequence
KHHLGIEEPHR

SEQ ID NO: 6891 - protein, 11 aa, Artificial
  IGFBP-2 heparin binding domain-containing peptide sequence
RHHLGIEEPHR

SEQ ID NO: 6892 - protein, 11 aa, Artificial
  IGFBP-2 heparin binding domain-containing peptide sequence
HHHLGIEEPHR

SEQ ID NO: 6893 - protein, 11 aa, Artificial
  IGFBP-2 heparin binding domain-containing peptide sequence
KKHLGIEEPHR

SEQ ID NO: 6894 - protein, 11 aa, Artificial
  IGFBP-2 heparin binding domain-containing peptide sequence
RKHLGIEEPHR

SEQ ID NO: 6895 - protein, 11 aa, Artificial
  IGFBP-2 heparin binding domain-containing peptide sequence
HKHLGIEEPHR

SEQ ID NO: 6896 - protein, 11 aa, Artificial
  IGFBP-2 heparin binding domain-containing peptide sequence
KRHLGIEEPHR

SEQ ID NO: 6897 - protein, 11 aa, Artificial
  IGFBP-2 heparin binding domain-containing peptide sequence
RRHLGIEEPHR

SEQ ID NO: 6898 - protein, 11 aa, Artificial
  IGFBP-2 heparin binding domain-containing peptide sequence
HRHLGIEEPHR

SEQ ID NO: 6899 - protein, 11 aa, Artificial
  IGFBP-2 heparin binding domain-containing peptide sequence
KHKLGIEEPHR

SEQ ID NO: 6900 - protein, 11 aa, Artificial
  IGFBP-2 heparin binding domain-containing peptide sequence
RHKLGIEEPHR

SEQ ID NO: 6901 - protein, 11 aa, Artificial
  IGFBP-2 heparin binding domain-containing peptide sequence
HHKLGIEEPHR

SEQ ID NO: 6902 - protein, 11 aa, Artificial
  IGFBP-2 heparin binding domain-containing peptide sequence
KKKLGIEEPHR

SEQ ID NO: 6903 - protein, 11 aa, Artificial
  IGFBP-2 heparin binding domain-containing peptide sequence
RKKLGIEEPHR

SEQ ID NO: 6904 - protein, 11 aa, Artificial
  IGFBP-2 heparin binding domain-containing peptide sequence
HKKLGIEEPHR

SEQ ID NO: 6905 - protein, 11 aa, Artificial
  IGFBP-2 heparin binding domain-containing peptide sequence
KRKLGIEEPHR

SEQ ID NO: 6906 - protein, 11 aa, Artificial
  IGFBP-2 heparin binding domain-containing peptide sequence
RRKLGIEEPHR

SEQ ID NO: 6907 - protein, 11 aa, Artificial
  IGFBP-2 heparin binding domain-containing peptide sequence
HRKLGIEEPHR

SEQ ID NO: 6908 - protein, 11 aa, Artificial
  IGFBP-2 heparin binding domain-containing peptide sequence
KHRLGIEEPHR

SEQ ID NO: 6909 - protein, 11 aa, Artificial
  IGFBP-2 heparin binding domain-containing peptide sequence
RHRLGIEEPHR

SEQ ID NO: 6910 - protein, 11 aa, Artificial
  IGFBP-2 heparin binding domain-containing peptide sequence
HHRLGIEEPHR

SEQ ID NO: 6911 - protein, 11 aa, Artificial
  IGFBP-2 heparin binding domain-containing peptide sequence
KKRLGIEEPHR

SEQ ID NO: 6912 - protein, 11 aa, Artificial
  IGFBP-2 heparin binding domain-containing peptide sequence
RKRLGIEEPHR

SEQ ID NO: 6913 - protein, 11 aa, Artificial
  IGFBP-2 heparin binding domain-containing peptide sequence
HKRLGIEEPHR

SEQ ID NO: 6914 - protein, 11 aa, Artificial
  IGFBP-2 heparin binding domain-containing peptide sequence
KRRLGIEEPHR

SEQ ID NO: 6915 - protein, 11 aa, Artificial
  IGFBP-2 heparin binding domain-containing peptide sequence
RRRLGIEEPHR

SEQ ID NO: 6916 - protein, 11 aa, Artificial
  IGFBP-2 heparin binding domain-containing peptide sequence
HRRLGIEEPHR

SEQ ID NO: 6917 - protein, 11 aa, Artificial
  IGFBP-2 heparin binding domain-containing peptide sequence
KHHIGIEEPHR

SEQ ID NO: 6918 - protein, 11 aa, Artificial
  IGFBP-2 heparin binding domain-containing peptide sequence
RHHIGIEEPHR

SEQ ID NO: 6919 - protein, 11 aa, Artificial
  IGFBP-2 heparin binding domain-containing peptide sequence
HHHIGIEEPHR

SEQ ID NO: 6920 - protein, 11 aa, Artificial
  IGFBP-2 heparin binding domain-containing peptide sequence
KKHIGIEEPHR

SEQ ID NO: 6921 - protein, 11 aa, Artificial
  IGFBP-2 heparin binding domain-containing peptide sequence
RKHIGIEEPHR

SEQ ID NO: 6922 - protein, 11 aa, Artificial
  IGFBP-2 heparin binding domain-containing peptide sequence
HKHIGIEEPHR

SEQ ID NO: 6923 - protein, 11 aa, Artificial
  IGFBP-2 heparin binding domain-containing peptide sequence
KRHIGIEEPHR

SEQ ID NO: 6924 - protein, 11 aa, Artificial
  IGFBP-2 heparin binding domain-containing peptide sequence
RRHIGIEEPHR

SEQ ID NO: 6925 - protein, 11 aa, Artificial
  IGFBP-2 heparin binding domain-containing peptide sequence
HRHIGIEEPHR

SEQ ID NO: 6926 - protein, 11 aa, Artificial
  IGFBP-2 heparin binding domain-containing peptide sequence
KHKIGIEEPHR

SEQ ID NO: 6927 - protein, 11 aa, Artificial
  IGFBP-2 heparin binding domain-containing peptide sequence
RHKIGIEEPHR

SEQ ID NO: 6928 - protein, 11 aa, Artificial
  IGFBP-2 heparin binding domain-containing peptide sequence
HHKIGIEEPHR

SEQ ID NO: 6929 - protein, 11 aa, Artificial
  IGFBP-2 heparin binding domain-containing peptide sequence
KKKIGIEEPHR

SEQ ID NO: 6930 - protein, 11 aa, Artificial
  IGFBP-2 heparin binding domain-containing peptide sequence
RKKIGIEEPHR

SEQ ID NO: 6931 - protein, 11 aa, Artificial
  IGFBP-2 heparin binding domain-containing peptide sequence
HKKIGIEEPHR

SEQ ID NO: 6932 - protein, 11 aa, Artificial
  IGFBP-2 heparin binding domain-containing peptide sequence
KRKIGIEEPHR

SEQ ID NO: 6933 - protein, 11 aa, Artificial
  IGFBP-2 heparin binding domain-containing peptide sequence
RRKIGIEEPHR

SEQ ID NO: 6934 - protein, 11 aa, Artificial
  IGFBP-2 heparin binding domain-containing peptide sequence
HRKIGIEEPHR

SEQ ID NO: 6935 - protein, 11 aa, Artificial
  IGFBP-2 heparin binding domain-containing peptide sequence
KHRIGIEEPHR

SEQ ID NO: 6936 - protein, 11 aa, Artificial
  IGFBP-2 heparin binding domain-containing peptide sequence
RHRIGIEEPHR

SEQ ID NO: 6937 - protein, 11 aa, Artificial
  IGFBP-2 heparin binding domain-containing peptide sequence
HHRIGIEEPHR

SEQ ID NO: 6938 - protein, 11 aa, Artificial
  IGFBP-2 heparin binding domain-containing peptide sequence
KKRIGIEEPHR

SEQ ID NO: 6939 - protein, 11 aa, Artificial
  IGFBP-2 heparin binding domain-containing peptide sequence
RKRIGIEEPHR

SEQ ID NO: 6940 - protein, 11 aa, Artificial
  IGFBP-2 heparin binding domain-containing peptide sequence
HKRIGIEEPHR

SEQ ID NO: 6941 - protein, 11 aa, Artificial
  IGFBP-2 heparin binding domain-containing peptide sequence
KRRIGIEEPHR

SEQ ID NO: 6942 - protein, 11 aa, Artificial
  IGFBP-2 heparin binding domain-containing peptide sequence
RRRIGIEEPHR

SEQ ID NO: 6943 - protein, 11 aa, Artificial
  IGFBP-2 heparin binding domain-containing peptide sequence
HRRIGIEEPHR

SEQ ID NO: 6944 - protein, 11 aa, Artificial
  IGFBP-2 heparin binding domain-containing peptide sequence
KHHVGIEEPHR

SEQ ID NO: 6945 - protein, 11 aa, Artificial
  IGFBP-2 heparin binding domain-containing peptide sequence
RHHVGIEEPHR

SEQ ID NO: 6946 - protein, 11 aa, Artificial
  IGFBP-2 heparin binding domain-containing peptide sequence
HHHVGIEEPHR

SEQ ID NO: 6947 - protein, 11 aa, Artificial
  IGFBP-2 heparin binding domain-containing peptide sequence
KKHVGIEEPHR

SEQ ID NO: 6948 - protein, 11 aa, Artificial
  IGFBP-2 heparin binding domain-containing peptide sequence
RKHVGIEEPHR

SEQ ID NO: 6949 - protein, 11 aa, Artificial
  IGFBP-2 heparin binding domain-containing peptide sequence
HKHVGIEEPHR

SEQ ID NO: 6950 - protein, 11 aa, Artificial
  IGFBP-2 heparin binding domain-containing peptide sequence
KRHVGIEEPHR

SEQ ID NO: 6951 - protein, 11 aa, Artificial
  IGFBP-2 heparin binding domain-containing peptide sequence
RRHVGIEEPHR

SEQ ID NO: 6952 - protein, 11 aa, Artificial
  IGFBP-2 heparin binding domain-containing peptide sequence
HRHVGIEEPHR

SEQ ID NO: 6953 - protein, 11 aa, Artificial
  IGFBP-2 heparin binding domain-containing peptide sequence
KHKVGIEEPHR

SEQ ID NO: 6954 - protein, 11 aa, Artificial
  IGFBP-2 heparin binding domain-containing peptide sequence
RHKVGIEEPHR

SEQ ID NO: 6955 - protein, 11 aa, Artificial
  IGFBP-2 heparin binding domain-containing peptide sequence
HHKVGIEEPHR

SEQ ID NO: 6956 - protein, 11 aa, Artificial
  IGFBP-2 heparin binding domain-containing peptide sequence
KKKVGIEEPHR

SEQ ID NO: 6957 - protein, 11 aa, Artificial
  IGFBP-2 heparin binding domain-containing peptide sequence
RKKVGIEEPHR

SEQ ID NO: 6958 - protein, 11 aa, Artificial
  IGFBP-2 heparin binding domain-containing peptide sequence
HKKVGIEEPHR

SEQ ID NO: 6959 - protein, 11 aa, Artificial
  IGFBP-2 heparin binding domain-containing peptide sequence
KRKVGIEEPHR

SEQ ID NO: 6960 - protein, 11 aa, Artificial
  IGFBP-2 heparin binding domain-containing peptide sequence
RRKVGIEEPHR

SEQ ID NO: 6961 - protein, 11 aa, Artificial
  IGFBP-2 heparin binding domain-containing peptide sequence
HRKVGIEEPHR

SEQ ID NO: 6962 - protein, 11 aa, Artificial
  IGFBP-2 heparin binding domain-containing peptide sequence
KHRVGIEEPHR

SEQ ID NO: 6963 - protein, 11 aa, Artificial
  IGFBP-2 heparin binding domain-containing peptide sequence
RHRVGIEEPHR

SEQ ID NO: 6964 - protein, 11 aa, Artificial
  IGFBP-2 heparin binding domain-containing peptide sequence
HHRVGIEEPHR

SEQ ID NO: 6965 - protein, 11 aa, Artificial
  IGFBP-2 heparin binding domain-containing peptide sequence
KKRVGIEEPHR

SEQ ID NO: 6966 - protein, 11 aa, Artificial
  IGFBP-2 heparin binding domain-containing peptide sequence
RKRVGIEEPHR

SEQ ID NO: 6967 - protein, 11 aa, Artificial
  IGFBP-2 heparin binding domain-containing peptide sequence
HKRVGIEEPHR

SEQ ID NO: 6968 - protein, 11 aa, Artificial
  IGFBP-2 heparin binding domain-containing peptide sequence
KRRVGIEEPHR

SEQ ID NO: 6969 - protein, 11 aa, Artificial
  IGFBP-2 heparin binding domain-containing peptide sequence
RRRVGIEEPHR

SEQ ID NO: 6970 - protein, 11 aa, Artificial
  IGFBP-2 heparin binding domain-containing peptide sequence
HRRVGIEEPHR

SEQ ID NO: 6971 - protein, 11 aa, Artificial
  IGFBP-2 heparin binding domain-containing peptide sequence
KHHLGVEEPHR

SEQ ID NO: 6972 - protein, 11 aa, Artificial
  IGFBP-2 heparin binding domain-containing peptide sequence
RHHLGVEEPHR

SEQ ID NO: 6973 - protein, 11 aa, Artificial
  IGFBP-2 heparin binding domain-containing peptide sequence
HHHLGVEEPHR

SEQ ID NO: 6974 - protein, 11 aa, Artificial
  IGFBP-2 heparin binding domain-containing peptide sequence
KKHLGVEEPHR

SEQ ID NO: 6975 - protein, 11 aa, Artificial
  IGFBP-2 heparin binding domain-containing peptide sequence
RKHLGVEEPHR

SEQ ID NO: 6976 - protein, 11 aa, Artificial
  IGFBP-2 heparin binding domain-containing peptide sequence
HKHLGVEEPHR

SEQ ID NO: 6977 - protein, 11 aa, Artificial
  IGFBP-2 heparin binding domain-containing peptide sequence
KRHLGVEEPHR

SEQ ID NO: 6978 - protein, 11 aa, Artificial
  IGFBP-2 heparin binding domain-containing peptide sequence
RRHLGVEEPHR

SEQ ID NO: 6979 - protein, 11 aa, Artificial
  IGFBP-2 heparin binding domain-containing peptide sequence
HRHLGVEEPHR

SEQ ID NO: 6980 - protein, 11 aa, Artificial
  IGFBP-2 heparin binding domain-containing peptide sequence
KHKLGVEEPHR

SEQ ID NO: 6981 - protein, 11 aa, Artificial
  IGFBP-2 heparin binding domain-containing peptide sequence
RHKLGVEEPHR

SEQ ID NO: 6982 - protein, 11 aa, Artificial
  IGFBP-2 heparin binding domain-containing peptide sequence
HHKLGVEEPHR

SEQ ID NO: 6983 - protein, 11 aa, Artificial
  IGFBP-2 heparin binding domain-containing peptide sequence
KKKLGVEEPHR

SEQ ID NO: 6984 - protein, 11 aa, Artificial
  IGFBP-2 heparin binding domain-containing peptide sequence
RKKLGVEEPHR

SEQ ID NO: 6985 - protein, 11 aa, Artificial
  IGFBP-2 heparin binding domain-containing peptide sequence
HKKLGVEEPHR

SEQ ID NO: 6986 - protein, 11 aa, Artificial
  IGFBP-2 heparin binding domain-containing peptide sequence
KRKLGVEEPHR

SEQ ID NO: 6987 - protein, 11 aa, Artificial
  IGFBP-2 heparin binding domain-containing peptide sequence
RRKLGVEEPHR

SEQ ID NO: 6988 - protein, 11 aa, Artificial
  IGFBP-2 heparin binding domain-containing peptide sequence
HRKLGVEEPHR

SEQ ID NO: 6989 - protein, 11 aa, Artificial
  IGFBP-2 heparin binding domain-containing peptide sequence
KHRLGVEEPHR

SEQ ID NO: 6990 - protein, 11 aa, Artificial
  IGFBP-2 heparin binding domain-containing peptide sequence
RHRLGVEEPHR

SEQ ID NO: 6991 - protein, 11 aa, Artificial
  IGFBP-2 heparin binding domain-containing peptide sequence
HHRLGVEEPHR

SEQ ID NO: 6992 - protein, 11 aa, Artificial
  IGFBP-2 heparin binding domain-containing peptide sequence
KKRLGVEEPHR

SEQ ID NO: 6993 - protein, 11 aa, Artificial
  IGFBP-2 heparin binding domain-containing peptide sequence
RKRLGVEEPHR

SEQ ID NO: 6994 - protein, 11 aa, Artificial
  IGFBP-2 heparin binding domain-containing peptide sequence
HKRLGVEEPHR

SEQ ID NO: 6995 - protein, 11 aa, Artificial
  IGFBP-2 heparin binding domain-containing peptide sequence
KRRLGVEEPHR

SEQ ID NO: 6996 - protein, 11 aa, Artificial
  IGFBP-2 heparin binding domain-containing peptide sequence
RRRLGVEEPHR

SEQ ID NO: 6997 - protein, 11 aa, Artificial
  IGFBP-2 heparin binding domain-containing peptide sequence
HRRLGVEEPHR

SEQ ID NO: 6998 - protein, 11 aa, Artificial
  IGFBP-2 heparin binding domain-containing peptide sequence
KHHIGVEEPHR

SEQ ID NO: 6999 - protein, 11 aa, Artificial
  IGFBP-2 heparin binding domain-containing peptide sequence
RHHIGVEEPHR

SEQ ID NO: 7000 - protein, 11 aa, Artificial
  IGFBP-2 heparin binding domain-containing peptide sequence
HHHIGVEEPHR

SEQ ID NO: 7001 - protein, 11 aa, Artificial
  IGFBP-2 heparin binding domain-containing peptide sequence
KKHIGVEEPHR

SEQ ID NO: 7002 - protein, 11 aa, Artificial
  IGFBP-2 heparin binding domain-containing peptide sequence
RKHIGVEEPHR

SEQ ID NO: 7003 - protein, 11 aa, Artificial
  IGFBP-2 heparin binding domain-containing peptide sequence
HKHIGVEEPHR

SEQ ID NO: 7004 - protein, 11 aa, Artificial
  IGFBP-2 heparin binding domain-containing peptide sequence
KRHIGVEEPHR

SEQ ID NO: 7005 - protein, 11 aa, Artificial
  IGFBP-2 heparin binding domain-containing peptide sequence
RRHIGVEEPHR

SEQ ID NO: 7006 - protein, 11 aa, Artificial
  IGFBP-2 heparin binding domain-containing peptide sequence
HRHIGVEEPHR

SEQ ID NO: 7007 - protein, 11 aa, Artificial
  IGFBP-2 heparin binding domain-containing peptide sequence
KHKIGVEEPHR

SEQ ID NO: 7008 - protein, 11 aa, Artificial
  IGFBP-2 heparin binding domain-containing peptide sequence
RHKIGVEEPHR

SEQ ID NO: 7009 - protein, 11 aa, Artificial
  IGFBP-2 heparin binding domain-containing peptide sequence
HHKIGVEEPHR

SEQ ID NO: 7010 - protein, 11 aa, Artificial
  IGFBP-2 heparin binding domain-containing peptide sequence
KKKIGVEEPHR

SEQ ID NO: 7011 - protein, 11 aa, Artificial
  IGFBP-2 heparin binding domain-containing peptide sequence
RKKIGVEEPHR

SEQ ID NO: 7012 - protein, 11 aa, Artificial
  IGFBP-2 heparin binding domain-containing peptide sequence
HKKIGVEEPHR

SEQ ID NO: 7013 - protein, 11 aa, Artificial
  IGFBP-2 heparin binding domain-containing peptide sequence
KRKIGVEEPHR

SEQ ID NO: 7014 - protein, 11 aa, Artificial
  IGFBP-2 heparin binding domain-containing peptide sequence
RRKIGVEEPHR

SEQ ID NO: 7015 - protein, 11 aa, Artificial
  IGFBP-2 heparin binding domain-containing peptide sequence
HRKIGVEEPHR

SEQ ID NO: 7016 - protein, 11 aa, Artificial
  IGFBP-2 heparin binding domain-containing peptide sequence
KHRIGVEEPHR

SEQ ID NO: 7017 - protein, 11 aa, Artificial
  IGFBP-2 heparin binding domain-containing peptide sequence
RHRIGVEEPHR

SEQ ID NO: 7018 - protein, 11 aa, Artificial
  IGFBP-2 heparin binding domain-containing peptide sequence
HHRIGVEEPHR

SEQ ID NO: 7019 - protein, 11 aa, Artificial
  IGFBP-2 heparin binding domain-containing peptide sequence
KKRIGVEEPHR

SEQ ID NO: 7020 - protein, 11 aa, Artificial
  IGFBP-2 heparin binding domain-containing peptide sequence
RKRIGVEEPHR

SEQ ID NO: 7021 - protein, 11 aa, Artificial
  IGFBP-2 heparin binding domain-containing peptide sequence
HKRIGVEEPHR

SEQ ID NO: 7022 - protein, 11 aa, Artificial
  IGFBP-2 heparin binding domain-containing peptide sequence
KRRIGVEEPHR

SEQ ID NO: 7023 - protein, 11 aa, Artificial
  IGFBP-2 heparin binding domain-containing peptide sequence
RRRIGVEEPHR

SEQ ID NO: 7024 - protein, 11 aa, Artificial
  IGFBP-2 heparin binding domain-containing peptide sequence
HRRIGVEEPHR

SEQ ID NO: 7025 - protein, 11 aa, Artificial
  IGFBP-2 heparin binding domain-containing peptide sequence
KHHVGVEEPHR

SEQ ID NO: 7026 - protein, 11 aa, Artificial
  IGFBP-2 heparin binding domain-containing peptide sequence
RHHVGVEEPHR

SEQ ID NO: 7027 - protein, 11 aa, Artificial
  IGFBP-2 heparin binding domain-containing peptide sequence
HHHVGVEEPHR

SEQ ID NO: 7028 - protein, 11 aa, Artificial
  IGFBP-2 heparin binding domain-containing peptide sequence
KKHVGVEEPHR

SEQ ID NO: 7029 - protein, 11 aa, Artificial
  IGFBP-2 heparin binding domain-containing peptide sequence
RKHVGVEEPHR

SEQ ID NO: 7030 - protein, 11 aa, Artificial
  IGFBP-2 heparin binding domain-containing peptide sequence
HKHVGVEEPHR

SEQ ID NO: 7031 - protein, 11 aa, Artificial
  IGFBP-2 heparin binding domain-containing peptide sequence
KRHVGVEEPHR

SEQ ID NO: 7032 - protein, 11 aa, Artificial
  IGFBP-2 heparin binding domain-containing peptide sequence
RRHVGVEEPHR

SEQ ID NO: 7033 - protein, 11 aa, Artificial
  IGFBP-2 heparin binding domain-containing peptide sequence
HRHVGVEEPHR

SEQ ID NO: 7034 - protein, 11 aa, Artificial
  IGFBP-2 heparin binding domain-containing peptide sequence
KHKVGVEEPHR

SEQ ID NO: 7035 - protein, 11 aa, Artificial
  IGFBP-2 heparin binding domain-containing peptide sequence
RHKVGVEEPHR

SEQ ID NO: 7036 - protein, 11 aa, Artificial
  IGFBP-2 heparin binding domain-containing peptide sequence
HHKVGVEEPHR

SEQ ID NO: 7037 - protein, 11 aa, Artificial
  IGFBP-2 heparin binding domain-containing peptide sequence
KKKVGVEEPHR

SEQ ID NO: 7038 - protein, 11 aa, Artificial
  IGFBP-2 heparin binding domain-containing peptide sequence
RKKVGVEEPHR

SEQ ID NO: 7039 - protein, 11 aa, Artificial
  IGFBP-2 heparin binding domain-containing peptide sequence
HKKVGVEEPHR

SEQ ID NO: 7040 - protein, 11 aa, Artificial
  IGFBP-2 heparin binding domain-containing peptide sequence
KRKVGVEEPHR

SEQ ID NO: 7041 - protein, 11 aa, Artificial
  IGFBP-2 heparin binding domain-containing peptide sequence
RRKVGVEEPHR

SEQ ID NO: 7042 - protein, 11 aa, Artificial
  IGFBP-2 heparin binding domain-containing peptide sequence
HRKVGVEEPHR

SEQ ID NO: 7043 - protein, 11 aa, Artificial
  IGFBP-2 heparin binding domain-containing peptide sequence
KHRVGVEEPHR

SEQ ID NO: 7044 - protein, 11 aa, Artificial
  IGFBP-2 heparin binding domain-containing peptide sequence
RHRVGVEEPHR

SEQ ID NO: 7045 - protein, 11 aa, Artificial
  IGFBP-2 heparin binding domain-containing peptide sequence
HHRVGVEEPHR

SEQ ID NO: 7046 - protein, 11 aa, Artificial
  IGFBP-2 heparin binding domain-containing peptide sequence
KKRVGVEEPHR

SEQ ID NO: 7047 - protein, 11 aa, Artificial
  IGFBP-2 heparin binding domain-containing peptide sequence
RKRVGVEEPHR

SEQ ID NO: 7048 - protein, 11 aa, Artificial
  IGFBP-2 heparin binding domain-containing peptide sequence
HKRVGVEEPHR

SEQ ID NO: 7049 - protein, 11 aa, Artificial
  IGFBP-2 heparin binding domain-containing peptide sequence
KRRVGVEEPHR

SEQ ID NO: 7050 - protein, 11 aa, Artificial
  IGFBP-2 heparin binding domain-containing peptide sequence
RRRVGVEEPHR

SEQ ID NO: 7051 - protein, 11 aa, Artificial
  IGFBP-2 heparin binding domain-containing peptide sequence
HRRVGVEEPHR

SEQ ID NO: 7052 - protein, 11 aa, Artificial
  IGFBP-2 heparin binding domain-containing peptide sequence
KHHLGLNEPHR

SEQ ID NO: 7053 - protein, 11 aa, Artificial
  IGFBP-2 heparin binding domain-containing peptide sequence
RHHLGLNEPHR

SEQ ID NO: 7054 - protein, 11 aa, Artificial
  IGFBP-2 heparin binding domain-containing peptide sequence
HHHLGLNEPHR

SEQ ID NO: 7055 - protein, 11 aa, Artificial
  IGFBP-2 heparin binding domain-containing peptide sequence
KKHLGLNEPHR

SEQ ID NO: 7056 - protein, 11 aa, Artificial
  IGFBP-2 heparin binding domain-containing peptide sequence
RKHLGLNEPHR

SEQ ID NO: 7057 - protein, 11 aa, Artificial
  IGFBP-2 heparin binding domain-containing peptide sequence
HKHLGLNEPHR

SEQ ID NO: 7058 - protein, 11 aa, Artificial
  IGFBP-2 heparin binding domain-containing peptide sequence
KRHLGLNEPHR

SEQ ID NO: 7059 - protein, 11 aa, Artificial
  IGFBP-2 heparin binding domain-containing peptide sequence
RRHLGLNEPHR

SEQ ID NO: 7060 - protein, 11 aa, Artificial
  IGFBP-2 heparin binding domain-containing peptide sequence
HRHLGLNEPHR

SEQ ID NO: 7061 - protein, 11 aa, Artificial
  IGFBP-2 heparin binding domain-containing peptide sequence
KHKLGLNEPHR

SEQ ID NO: 7062 - protein, 11 aa, Artificial
  IGFBP-2 heparin binding domain-containing peptide sequence
RHKLGLNEPHR

SEQ ID NO: 7063 - protein, 11 aa, Artificial
  IGFBP-2 heparin binding domain-containing peptide sequence
HHKLGLNEPHR

SEQ ID NO: 7064 - protein, 11 aa, Artificial
  IGFBP-2 heparin binding domain-containing peptide sequence
KKKLGLNEPHR

SEQ ID NO: 7065 - protein, 11 aa, Artificial
  IGFBP-2 heparin binding domain-containing peptide sequence
RKKLGLNEPHR

SEQ ID NO: 7066 - protein, 11 aa, Artificial
  IGFBP-2 heparin binding domain-containing peptide sequence
HKKLGLNEPHR

SEQ ID NO: 7067 - protein, 11 aa, Artificial
  IGFBP-2 heparin binding domain-containing peptide sequence
KRKLGLNEPHR

SEQ ID NO: 7068 - protein, 11 aa, Artificial
  IGFBP-2 heparin binding domain-containing peptide sequence
RRKLGLNEPHR

SEQ ID NO: 7069 - protein, 11 aa, Artificial
  IGFBP-2 heparin binding domain-containing peptide sequence
HRKLGLNEPHR

SEQ ID NO: 7070 - protein, 11 aa, Artificial
  IGFBP-2 heparin binding domain-containing peptide sequence
KHRLGLNEPHR

SEQ ID NO: 7071 - protein, 11 aa, Artificial
  IGFBP-2 heparin binding domain-containing peptide sequence
RHRLGLNEPHR

SEQ ID NO: 7072 - protein, 11 aa, Artificial
  IGFBP-2 heparin binding domain-containing peptide sequence
HHRLGLNEPHR

SEQ ID NO: 7073 - protein, 11 aa, Artificial
  IGFBP-2 heparin binding domain-containing peptide sequence
KKRLGLNEPHR

SEQ ID NO: 7074 - protein, 11 aa, Artificial
  IGFBP-2 heparin binding domain-containing peptide sequence
RKRLGLNEPHR

SEQ ID NO: 7075 - protein, 11 aa, Artificial
  IGFBP-2 heparin binding domain-containing peptide sequence
HKRLGLNEPHR

SEQ ID NO: 7076 - protein, 11 aa, Artificial
  IGFBP-2 heparin binding domain-containing peptide sequence
KRRLGLNEPHR

SEQ ID NO: 7077 - protein, 11 aa, Artificial
  IGFBP-2 heparin binding domain-containing peptide sequence
RRRLGLNEPHR

SEQ ID NO: 7078 - protein, 11 aa, Artificial
  IGFBP-2 heparin binding domain-containing peptide sequence
HRRLGLNEPHR

SEQ ID NO: 7079 - protein, 10 aa, Artificial
  IGFBP-2 heparin binding domain-containing peptide sequence
KHHIGLNPHR

SEQ ID NO: 7080 - protein, 11 aa, Artificial
  IGFBP-2 heparin binding domain-containing peptide sequence
RHHIGLNEPHR

SEQ ID NO: 7081 - protein, 11 aa, Artificial
  IGFBP-2 heparin binding domain-containing peptide sequence
HHHIGLNEPHR

SEQ ID NO: 7082 - protein, 11 aa, Artificial
  IGFBP-2 heparin binding domain-containing peptide sequence
KKHIGLNEPHR

SEQ ID NO: 7083 - protein, 11 aa, Artificial
  IGFBP-2 heparin binding domain-containing peptide sequence
RKHIGLNEPHR

SEQ ID NO: 7084 - protein, 11 aa, Artificial
  IGFBP-2 heparin binding domain-containing peptide sequence
HKHIGLNEPHR

SEQ ID NO: 7085 - protein, 11 aa, Artificial
  IGFBP-2 heparin binding domain-containing peptide sequence
KRHIGLNEPHR

SEQ ID NO: 7086 - protein, 11 aa, Artificial
  IGFBP-2 heparin binding domain-containing peptide sequence
RRHIGLNEPHR

SEQ ID NO: 7087 - protein, 11 aa, Artificial
  IGFBP-2 heparin binding domain-containing peptide sequence
HRHIGLNEPHR

SEQ ID NO: 7088 - protein, 11 aa, Artificial
  IGFBP-2 heparin binding domain-containing peptide sequence
KHKIGLNEPHR

SEQ ID NO: 7089 - protein, 11 aa, Artificial
  IGFBP-2 heparin binding domain-containing peptide sequence
RHKIGLNEPHR

SEQ ID NO: 7090 - protein, 11 aa, Artificial
  IGFBP-2 heparin binding domain-containing peptide sequence
HHKIGLNEPHR

SEQ ID NO: 7091 - protein, 11 aa, Artificial
  IGFBP-2 heparin binding domain-containing peptide sequence
KKKIGLNEPHR

SEQ ID NO: 7092 - protein, 11 aa, Artificial
  IGFBP-2 heparin binding domain-containing peptide sequence
RKKIGLNEPHR

SEQ ID NO: 7093 - protein, 11 aa, Artificial
  IGFBP-2 heparin binding domain-containing peptide sequence
HKKIGLNEPHR

SEQ ID NO: 7094 - protein, 11 aa, Artificial
  IGFBP-2 heparin binding domain-containing peptide sequence
KRKIGLNEPHR

SEQ ID NO: 7095 - protein, 11 aa, Artificial
  IGFBP-2 heparin binding domain-containing peptide sequence
RRKIGLNEPHR

SEQ ID NO: 7096 - protein, 11 aa, Artificial
  IGFBP-2 heparin binding domain-containing peptide sequence
HRKIGLNEPHR

SEQ ID NO: 7097 - protein, 11 aa, Artificial
  IGFBP-2 heparin binding domain-containing peptide sequence
KHRIGLNEPHR

SEQ ID NO: 7098 - protein, 11 aa, Artificial
  IGFBP-2 heparin binding domain-containing peptide sequence
RHRIGLNEPHR

SEQ ID NO: 7099 - protein, 11 aa, Artificial
  IGFBP-2 heparin binding domain-containing peptide sequence
HHRIGLNEPHR

SEQ ID NO: 7100 - protein, 11 aa, Artificial
  IGFBP-2 heparin binding domain-containing peptide sequence
KKRIGLNEPHR

SEQ ID NO: 7101 - protein, 11 aa, Artificial
  IGFBP-2 heparin binding domain-containing peptide sequence
RKRIGLNEPHR

SEQ ID NO: 7102 - protein, 11 aa, Artificial
  IGFBP-2 heparin binding domain-containing peptide sequence
HKRIGLNEPHR

SEQ ID NO: 7103 - protein, 11 aa, Artificial
  IGFBP-2 heparin binding domain-containing peptide sequence
KRRIGLNEPHR

SEQ ID NO: 7104 - protein, 11 aa, Artificial
  IGFBP-2 heparin binding domain-containing peptide sequence
RRRIGLNEPHR

SEQ ID NO: 7105 - protein, 11 aa, Artificial
  IGFBP-2 heparin binding domain-containing peptide sequence
HRRIGLNEPHR

SEQ ID NO: 7106 - protein, 11 aa, Artificial
  IGFBP-2 heparin binding domain-containing peptide sequence
KHHVGLNEPHR

SEQ ID NO: 7107 - protein, 11 aa, Artificial
  IGFBP-2 heparin binding domain-containing peptide sequence
RHHVGLNEPHR

SEQ ID NO: 7108 - protein, 11 aa, Artificial
  IGFBP-2 heparin binding domain-containing peptide sequence
HHHVGLNEPHR

SEQ ID NO: 7109 - protein, 11 aa, Artificial
  IGFBP-2 heparin binding domain-containing peptide sequence
KKHVGLNEPHR

SEQ ID NO: 7110 - protein, 11 aa, Artificial
  IGFBP-2 heparin binding domain-containing peptide sequence
RKHVGLNEPHR

SEQ ID NO: 7111 - protein, 11 aa, Artificial
  IGFBP-2 heparin binding domain-containing peptide sequence
HKHVGLNEPHR

SEQ ID NO: 7112 - protein, 11 aa, Artificial
  IGFBP-2 heparin binding domain-containing peptide sequence
KRHVGLNEPHR

SEQ ID NO: 7113 - protein, 11 aa, Artificial
  IGFBP-2 heparin binding domain-containing peptide sequence
RRHVGLNEPHR

SEQ ID NO: 7114 - protein, 11 aa, Artificial
  IGFBP-2 heparin binding domain-containing peptide sequence
HRHVGLNEPHR

SEQ ID NO: 7115 - protein, 11 aa, Artificial
  IGFBP-2 heparin binding domain-containing peptide sequence
KHKVGLNEPHR

SEQ ID NO: 7116 - protein, 11 aa, Artificial
  IGFBP-2 heparin binding domain-containing peptide sequence
RHKVGLNEPHR

SEQ ID NO: 7117 - protein, 11 aa, Artificial
  IGFBP-2 heparin binding domain-containing peptide sequence
HHKVGLNEPHR

SEQ ID NO: 7118 - protein, 11 aa, Artificial
  IGFBP-2 heparin binding domain-containing peptide sequence
KKKVGLNEPHR

SEQ ID NO: 7119 - protein, 11 aa, Artificial
  IGFBP-2 heparin binding domain-containing peptide sequence
RKKVGLNEPHR

SEQ ID NO: 7120 - protein, 11 aa, Artificial
  IGFBP-2 heparin binding domain-containing peptide sequence
HKKVGLNEPHR

SEQ ID NO: 7121 - protein, 11 aa, Artificial
  IGFBP-2 heparin binding domain-containing peptide sequence
KRKVGLNEPHR

SEQ ID NO: 7122 - protein, 11 aa, Artificial
  IGFBP-2 heparin binding domain-containing peptide sequence
RRKVGLNEPHR

SEQ ID NO: 7123 - protein, 11 aa, Artificial
  IGFBP-2 heparin binding domain-containing peptide sequence
HRKVGLNEPHR

SEQ ID NO: 7124 - protein, 11 aa, Artificial
  IGFBP-2 heparin binding domain-containing peptide sequence
KHRVGLNEPHR

SEQ ID NO: 7125 - protein, 11 aa, Artificial
  IGFBP-2 heparin binding domain-containing peptide sequence
RHRVGLNEPHR

SEQ ID NO: 7126 - protein, 11 aa, Artificial
  IGFBP-2 heparin binding domain-containing peptide sequence
HHRVGLNEPHR

SEQ ID NO: 7127 - protein, 11 aa, Artificial
  IGFBP-2 heparin binding domain-containing peptide sequence
KKRVGLNEPHR

SEQ ID NO: 7128 - protein, 11 aa, Artificial
  IGFBP-2 heparin binding domain-containing peptide sequence
RKRVGLNEPHR

SEQ ID NO: 7129 - protein, 11 aa, Artificial
  IGFBP-2 heparin binding domain-containing peptide sequence
HKRVGLNEPHR

SEQ ID NO: 7130 - protein, 11 aa, Artificial
  IGFBP-2 heparin binding domain-containing peptide sequence
KRRVGLNEPHR

SEQ ID NO: 7131 - protein, 11 aa, Artificial
  IGFBP-2 heparin binding domain-containing peptide sequence
RRRVGLNEPHR

SEQ ID NO: 7132 - protein, 11 aa, Artificial
  IGFBP-2 heparin binding domain-containing peptide sequence
HRRVGLNEPHR

SEQ ID NO: 7133 - protein, 11 aa, Artificial
  IGFBP-2 heparin binding domain-containing peptide sequence
KHHLGINEPHR

SEQ ID NO: 7134 - protein, 11 aa, Artificial
  IGFBP-2 heparin binding domain-containing peptide sequence
RHHLGINEPHR

SEQ ID NO: 7135 - protein, 11 aa, Artificial
  IGFBP-2 heparin binding domain-containing peptide sequence
HHHLGINEPHR

SEQ ID NO: 7136 - protein, 11 aa, Artificial
  IGFBP-2 heparin binding domain-containing peptide sequence
KKHLGINEPHR

SEQ ID NO: 7137 - protein, 11 aa, Artificial
  IGFBP-2 heparin binding domain-containing peptide sequence
RKHLGINEPHR

SEQ ID NO: 7138 - protein, 11 aa, Artificial
  IGFBP-2 heparin binding domain-containing peptide sequence
HKHLGINEPHR

SEQ ID NO: 7139 - protein, 11 aa, Artificial
  IGFBP-2 heparin binding domain-containing peptide sequence
KRHLGINEPHR

SEQ ID NO: 7140 - protein, 11 aa, Artificial
  IGFBP-2 heparin binding domain-containing peptide sequence
RRHLGINEPHR

SEQ ID NO: 7141 - protein, 11 aa, Artificial
  IGFBP-2 heparin binding domain-containing peptide sequence
HRHLGINEPHR

SEQ ID NO: 7142 - protein, 11 aa, Artificial
  IGFBP-2 heparin binding domain-containing peptide sequence
KHKLGINEPHR

SEQ ID NO: 7143 - protein, 11 aa, Artificial
  IGFBP-2 heparin binding domain-containing peptide sequence
RHKLGINEPHR

SEQ ID NO: 7144 - protein, 11 aa, Artificial
  IGFBP-2 heparin binding domain-containing peptide sequence
HHKLGINEPHR

SEQ ID NO: 7145 - protein, 11 aa, Artificial
  IGFBP-2 heparin binding domain-containing peptide sequence
KKKLGINEPHR

SEQ ID NO: 7146 - protein, 11 aa, Artificial
  IGFBP-2 heparin binding domain-containing peptide sequence
RKKLGINEPHR

SEQ ID NO: 7147 - protein, 11 aa, Artificial
  IGFBP-2 heparin binding domain-containing peptide sequence
HKKLGINEPHR

SEQ ID NO: 7148 - protein, 11 aa, Artificial
  IGFBP-2 heparin binding domain-containing peptide sequence
KRKLGINEPHR

SEQ ID NO: 7149 - protein, 11 aa, Artificial
  IGFBP-2 heparin binding domain-containing peptide sequence
RRKLGINEPHR

SEQ ID NO: 7150 - protein, 11 aa, Artificial
  IGFBP-2 heparin binding domain-containing peptide sequence
HRKLGINEPHR

SEQ ID NO: 7151 - protein, 11 aa, Artificial
  IGFBP-2 heparin binding domain-containing peptide sequence
KHRLGINEPHR

SEQ ID NO: 7152 - protein, 11 aa, Artificial
  IGFBP-2 heparin binding domain-containing peptide sequence
RHRLGINEPHR

SEQ ID NO: 7153 - protein, 11 aa, Artificial
  IGFBP-2 heparin binding domain-containing peptide sequence
HHRLGINEPHR

SEQ ID NO: 7154 - protein, 11 aa, Artificial
  IGFBP-2 heparin binding domain-containing peptide sequence
KKRLGINEPHR

SEQ ID NO: 7155 - protein, 11 aa, Artificial
  IGFBP-2 heparin binding domain-containing peptide sequence
RKRLGINEPHR

SEQ ID NO: 7156 - protein, 11 aa, Artificial
  IGFBP-2 heparin binding domain-containing peptide sequence
HKRLGINEPHR

SEQ ID NO: 7157 - protein, 11 aa, Artificial
  IGFBP-2 heparin binding domain-containing peptide sequence
KRRLGINEPHR

SEQ ID NO: 7158 - protein, 11 aa, Artificial
  IGFBP-2 heparin binding domain-containing peptide sequence
RRRLGINEPHR

SEQ ID NO: 7159 - protein, 11 aa, Artificial
  IGFBP-2 heparin binding domain-containing peptide sequence
HRRLGINEPHR

SEQ ID NO: 7160 - protein, 11 aa, Artificial
  IGFBP-2 heparin binding domain-containing peptide sequence
KHHIGIENPHR

SEQ ID NO: 7161 - protein, 11 aa, Artificial
  IGFBP-2 heparin binding domain-containing peptide sequence
RHHIGINEPHR

SEQ ID NO: 7162 - protein, 11 aa, Artificial
  IGFBP-2 heparin binding domain-containing peptide sequence
HHHIGINEPHR

SEQ ID NO: 7163 - protein, 11 aa, Artificial
  IGFBP-2 heparin binding domain-containing peptide sequence
KKHIGINEPHR

SEQ ID NO: 7164 - protein, 11 aa, Artificial
  IGFBP-2 heparin binding domain-containing peptide sequence
RKHIGINEPHR

SEQ ID NO: 7165 - protein, 11 aa, Artificial
  IGFBP-2 heparin binding domain-containing peptide sequence
HKHIGINEPHR

SEQ ID NO: 7166 - protein, 11 aa, Artificial
  IGFBP-2 heparin binding domain-containing peptide sequence
KRHIGINEPHR

SEQ ID NO: 7167 - protein, 11 aa, Artificial
  IGFBP-2 heparin binding domain-containing peptide sequence
RRHIGINEPHR

SEQ ID NO: 7168 - protein, 11 aa, Artificial
  IGFBP-2 heparin binding domain-containing peptide sequence
HRHIGINEPHR

SEQ ID NO: 7169 - protein, 11 aa, Artificial
  IGFBP-2 heparin binding domain-containing peptide sequence
KHKIGINEPHR

SEQ ID NO: 7170 - protein, 11 aa, Artificial
  IGFBP-2 heparin binding domain-containing peptide sequence
RHKIGINEPHR

SEQ ID NO: 7171 - protein, 11 aa, Artificial
  IGFBP-2 heparin binding domain-containing peptide sequence
HHKIGINEPHR

SEQ ID NO: 7172 - protein, 11 aa, Artificial
  IGFBP-2 heparin binding domain-containing peptide sequence
KKKIGINEPHR

SEQ ID NO: 7173 - protein, 11 aa, Artificial
  IGFBP-2 heparin binding domain-containing peptide sequence
RKKIGINEPHR

SEQ ID NO: 7174 - protein, 11 aa, Artificial
  IGFBP-2 heparin binding domain-containing peptide sequence
HKKIGINEPHR

SEQ ID NO: 7175 - protein, 11 aa, Artificial
  IGFBP-2 heparin binding domain-containing peptide sequence
KRKIGINEPHR

SEQ ID NO: 7176 - protein, 11 aa, Artificial
  IGFBP-2 heparin binding domain-containing peptide sequence
RRKIGINEPHR

SEQ ID NO: 7177 - protein, 11 aa, Artificial
  IGFBP-2 heparin binding domain-containing peptide sequence
HRKIGINEPHR

SEQ ID NO: 7178 - protein, 11 aa, Artificial
  IGFBP-2 heparin binding domain-containing peptide sequence
KHRIGINEPHR

SEQ ID NO: 7179 - protein, 11 aa, Artificial
  IGFBP-2 heparin binding domain-containing peptide sequence
RHRIGINEPHR

SEQ ID NO: 7180 - protein, 11 aa, Artificial
  IGFBP-2 heparin binding domain-containing peptide sequence
HHRIGINEPHR

SEQ ID NO: 7181 - protein, 11 aa, Artificial
  IGFBP-2 heparin binding domain-containing peptide sequence
KKRIGINEPHR

SEQ ID NO: 7182 - protein, 11 aa, Artificial
  IGFBP-2 heparin binding domain-containing peptide sequence
RKRIGINEPHR

SEQ ID NO: 7183 - protein, 11 aa, Artificial
  IGFBP-2 heparin binding domain-containing peptide sequence
HKRIGINEPHR

SEQ ID NO: 7184 - protein, 11 aa, Artificial
  IGFBP-2 heparin binding domain-containing peptide sequence
KRRIGINEPHR

SEQ ID NO: 7185 - protein, 11 aa, Artificial
  IGFBP-2 heparin binding domain-containing peptide sequence
RRRIGINEPHR

SEQ ID NO: 7186 - protein, 11 aa, Artificial
  IGFBP-2 heparin binding domain-containing peptide sequence
HRRIGINEPHR

SEQ ID NO: 7187 - protein, 11 aa, Artificial
  IGFBP-2 heparin binding domain-containing peptide sequence
KHHVGINEPHR

SEQ ID NO: 7188 - protein, 11 aa, Artificial
  IGFBP-2 heparin binding domain-containing peptide sequence
RHHVGINEPHR

SEQ ID NO: 7189 - protein, 11 aa, Artificial
  IGFBP-2 heparin binding domain-containing peptide sequence
HHHVGINEPHR

SEQ ID NO: 7190 - protein, 11 aa, Artificial
  IGFBP-2 heparin binding domain-containing peptide sequence
KKHVGINEPHR

SEQ ID NO: 7191 - protein, 11 aa, Artificial
  IGFBP-2 heparin binding domain-containing peptide sequence
RKHVGINEPHR

SEQ ID NO: 7192 - protein, 11 aa, Artificial
  IGFBP-2 heparin binding domain-containing peptide sequence
HKHVGINEPHR

SEQ ID NO: 7193 - protein, 11 aa, Artificial
  IGFBP-2 heparin binding domain-containing peptide sequence
KRHVGINEPHR

SEQ ID NO: 7194 - protein, 11 aa, Artificial
  IGFBP-2 heparin binding domain-containing peptide sequence
RRHVGINEPHR

SEQ ID NO: 7195 - protein, 11 aa, Artificial
  IGFBP-2 heparin binding domain-containing peptide sequence
HRHVGINEPHR

SEQ ID NO: 7196 - protein, 11 aa, Artificial
  IGFBP-2 heparin binding domain-containing peptide sequence
KHKVGINEPHR

SEQ ID NO: 7197 - protein, 11 aa, Artificial
  IGFBP-2 heparin binding domain-containing peptide sequence
RHKVGINEPHR

SEQ ID NO: 7198 - protein, 11 aa, Artificial
  IGFBP-2 heparin binding domain-containing peptide sequence
HHKVGINEPHR

SEQ ID NO: 7199 - protein, 11 aa, Artificial
  IGFBP-2 heparin binding domain-containing peptide sequence
KKKVGINEPHR

SEQ ID NO: 7200 - protein, 11 aa, Artificial
  IGFBP-2 heparin binding domain-containing peptide sequence
RKKVGINEPHR

SEQ ID NO: 7201 - protein, 11 aa, Artificial
  IGFBP-2 heparin binding domain-containing peptide sequence
HKKVGINEPHR

SEQ ID NO: 7202 - protein, 11 aa, Artificial
  IGFBP-2 heparin binding domain-containing peptide sequence
KRKVGINEPHR

SEQ ID NO: 7203 - protein, 11 aa, Artificial
  IGFBP-2 heparin binding domain-containing peptide sequence
RRKVGINEPHR

SEQ ID NO: 7204 - protein, 11 aa, Artificial
  IGFBP-2 heparin binding domain-containing peptide sequence
HRKVGINEPHR

SEQ ID NO: 7205 - protein, 11 aa, Artificial
  IGFBP-2 heparin binding domain-containing peptide sequence
KHRVGINEPHR

SEQ ID NO: 7206 - protein, 11 aa, Artificial
  IGFBP-2 heparin binding domain-containing peptide sequence
RHRVGINEPHR

SEQ ID NO: 7207 - protein, 11 aa, Artificial
  IGFBP-2 heparin binding domain-containing peptide sequence
HHRVGINEPHR

SEQ ID NO: 7208 - protein, 11 aa, Artificial
  IGFBP-2 heparin binding domain-containing peptide sequence
KKRVGINEPHR

SEQ ID NO: 7209 - protein, 11 aa, Artificial
  IGFBP-2 heparin binding domain-containing peptide sequence
RKRVGINEPHR

SEQ ID NO: 7210 - protein, 11 aa, Artificial
  IGFBP-2 heparin binding domain-containing peptide sequence
HKRVGINEPHR

SEQ ID NO: 7211 - protein, 11 aa, Artificial
  IGFBP-2 heparin binding domain-containing peptide sequence
KRRVGINEPHR

SEQ ID NO: 7212 - protein, 11 aa, Artificial
  IGFBP-2 heparin binding domain-containing peptide sequence
RRRVGINEPHR

SEQ ID NO: 7213 - protein, 11 aa, Artificial
  IGFBP-2 heparin binding domain-containing peptide sequence
HRRVGINEPHR

SEQ ID NO: 7214 - protein, 11 aa, Artificial
  IGFBP-2 heparin binding domain-containing peptide sequence
KHHLGVNEPHR

SEQ ID NO: 7215 - protein, 11 aa, Artificial
  IGFBP-2 heparin binding domain-containing peptide sequence
RHHLGVNEPHR

SEQ ID NO: 7216 - protein, 11 aa, Artificial
  IGFBP-2 heparin binding domain-containing peptide sequence
HHHLGVNEPHR

SEQ ID NO: 7217 - protein, 11 aa, Artificial
  IGFBP-2 heparin binding domain-containing peptide sequence
KKHLGVNEPHR

SEQ ID NO: 7218 - protein, 11 aa, Artificial
  IGFBP-2 heparin binding domain-containing peptide sequence
RKHLGVNEPHR

SEQ ID NO: 7219 - protein, 11 aa, Artificial
  IGFBP-2 heparin binding domain-containing peptide sequence
HKHLGVNEPHR

SEQ ID NO: 7220 - protein, 11 aa, Artificial
  IGFBP-2 heparin binding domain-containing peptide sequence
KRHLGVNEPHR

SEQ ID NO: 7221 - protein, 11 aa, Artificial
  IGFBP-2 heparin binding domain-containing peptide sequence
RRHLGVNEPHR

SEQ ID NO: 7222 - protein, 11 aa, Artificial
  IGFBP-2 heparin binding domain-containing peptide sequence
HRHLGVNEPHR

SEQ ID NO: 7223 - protein, 11 aa, Artificial
  IGFBP-2 heparin binding domain-containing peptide sequence
KHKLGVNEPHR

SEQ ID NO: 7224 - protein, 11 aa, Artificial
  IGFBP-2 heparin binding domain-containing peptide sequence
RHKLGVNEPHR

SEQ ID NO: 7225 - protein, 11 aa, Artificial
  IGFBP-2 heparin binding domain-containing peptide sequence
HHKLGVNEPHR

SEQ ID NO: 7226 - protein, 11 aa, Artificial
  IGFBP-2 heparin binding domain-containing peptide sequence
KKKLGVNEPHR

SEQ ID NO: 7227 - protein, 11 aa, Artificial
  IGFBP-2 heparin binding domain-containing peptide sequence
RKKLGVNEPHR

SEQ ID NO: 7228 - protein, 11 aa, Artificial
  IGFBP-2 heparin binding domain-containing peptide sequence
HKKLGVNEPHR

SEQ ID NO: 7229 - protein, 11 aa, Artificial
  IGFBP-2 heparin binding domain-containing peptide sequence
KRKLGVNEPHR

SEQ ID NO: 7230 - protein, 11 aa, Artificial
  IGFBP-2 heparin binding domain-containing peptide sequence
RRKLGVNEPHR

SEQ ID NO: 7231 - protein, 11 aa, Artificial
  IGFBP-2 heparin binding domain-containing peptide sequence
HRKLGVNEPHR

SEQ ID NO: 7232 - protein, 11 aa, Artificial
  IGFBP-2 heparin binding domain-containing peptide sequence
KHRLGVNEPHR

SEQ ID NO: 7233 - protein, 11 aa, Artificial
  IGFBP-2 heparin binding domain-containing peptide sequence
RHRLGVNEPHR

SEQ ID NO: 7234 - protein, 11 aa, Artificial
  IGFBP-2 heparin binding domain-containing peptide sequence
HHRLGVNEPHR

SEQ ID NO: 7235 - protein, 11 aa, Artificial
  IGFBP-2 heparin binding domain-containing peptide sequence
KKRLGVNEPHR

SEQ ID NO: 7236 - protein, 11 aa, Artificial
  IGFBP-2 heparin binding domain-containing peptide sequence
RKRLGVNEPHR

SEQ ID NO: 7237 - protein, 11 aa, Artificial
  IGFBP-2 heparin binding domain-containing peptide sequence
HKRLGVNEPHR

SEQ ID NO: 7238 - protein, 11 aa, Artificial
  IGFBP-2 heparin binding domain-containing peptide sequence
KRRLGVNEPHR

SEQ ID NO: 7239 - protein, 11 aa, Artificial
  IGFBP-2 heparin binding domain-containing peptide sequence
RRRLGVNEPHR

SEQ ID NO: 7240 - protein, 11 aa, Artificial
  IGFBP-2 heparin binding domain-containing peptide sequence
HRRLGVNEPHR

SEQ ID NO: 7241 - protein, 11 aa, Artificial
  IGFBP-2 heparin binding domain-containing peptide sequence
KHHIGVNEPHR

SEQ ID NO: 7242 - protein, 11 aa, Artificial
  IGFBP-2 heparin binding domain-containing peptide sequence
RHHIGVNEPHR

SEQ ID NO: 7243 - protein, 11 aa, Artificial
  IGFBP-2 heparin binding domain-containing peptide sequence
HHHIGVNEPHR

SEQ ID NO: 7244 - protein, 11 aa, Artificial
  IGFBP-2 heparin binding domain-containing peptide sequence
KKHIGVNEPHR

SEQ ID NO: 7245 - protein, 11 aa, Artificial
  IGFBP-2 heparin binding domain-containing peptide sequence
RKHIGVNEPHR

SEQ ID NO: 7246 - protein, 11 aa, Artificial
  IGFBP-2 heparin binding domain-containing peptide sequence
HKHIGVNEPHR

SEQ ID NO: 7247 - protein, 11 aa, Artificial
  IGFBP-2 heparin binding domain-containing peptide sequence
KRHIGVNEPHR

SEQ ID NO: 7248 - protein, 11 aa, Artificial
  IGFBP-2 heparin binding domain-containing peptide sequence
RRHIGVNEPHR

SEQ ID NO: 7249 - protein, 11 aa, Artificial
  IGFBP-2 heparin binding domain-containing peptide sequence
HRHIGVNEPHR

SEQ ID NO: 7250 - protein, 11 aa, Artificial
  IGFBP-2 heparin binding domain-containing peptide sequence
KHKIGVNEPHR

SEQ ID NO: 7251 - protein, 11 aa, Artificial
  IGFBP-2 heparin binding domain-containing peptide sequence
RHKIGVNEPHR

SEQ ID NO: 7252 - protein, 11 aa, Artificial
  IGFBP-2 heparin binding domain-containing peptide sequence
HHKIGVNEPHR

SEQ ID NO: 7253 - protein, 11 aa, Artificial
  IGFBP-2 heparin binding domain-containing peptide sequence
KKKIGVNEPHR

SEQ ID NO: 7254 - protein, 11 aa, Artificial
  IGFBP-2 heparin binding domain-containing peptide sequence
RKKIGVNEPHR

SEQ ID NO: 7255 - protein, 11 aa, Artificial
  IGFBP-2 heparin binding domain-containing peptide sequence
HKKIGVNEPHR

SEQ ID NO: 7256 - protein, 11 aa, Artificial
  IGFBP-2 heparin binding domain-containing peptide sequence
KRKIGVNEPHR

SEQ ID NO: 7257 - protein, 11 aa, Artificial
  IGFBP-2 heparin binding domain-containing peptide sequence
RRKIGVNEPHR

SEQ ID NO: 7258 - protein, 11 aa, Artificial
  IGFBP-2 heparin binding domain-containing peptide sequence
HRKIGVNEPHR

SEQ ID NO: 7259 - protein, 11 aa, Artificial
  IGFBP-2 heparin binding domain-containing peptide sequence
KHRIGVNEPHR

SEQ ID NO: 7260 - protein, 11 aa, Artificial
  IGFBP-2 heparin binding domain-containing peptide sequence
RHRIGVNEPHR

SEQ ID NO: 7261 - protein, 11 aa, Artificial
  IGFBP-2 heparin binding domain-containing peptide sequence
HHRIGVNEPHR

SEQ ID NO: 7262 - protein, 11 aa, Artificial
  IGFBP-2 heparin binding domain-containing peptide sequence
KKRIGVNEPHR

SEQ ID NO: 7263 - protein, 11 aa, Artificial
  IGFBP-2 heparin binding domain-containing peptide sequence
RKRIGVNEPHR

SEQ ID NO: 7264 - protein, 11 aa, Artificial
  IGFBP-2 heparin binding domain-containing peptide sequence
HKRIGVNEPHR

SEQ ID NO: 7265 - protein, 11 aa, Artificial
  IGFBP-2 heparin binding domain-containing peptide sequence
KRRIGVNEPHR

SEQ ID NO: 7266 - protein, 11 aa, Artificial
  IGFBP-2 heparin binding domain-containing peptide sequence
RRRIGVNEPHR

SEQ ID NO: 7267 - protein, 11 aa, Artificial
  IGFBP-2 heparin binding domain-containing peptide sequence
HRRIGVNEPHR

SEQ ID NO: 7268 - protein, 11 aa, Artificial
  IGFBP-2 heparin binding domain-containing peptide sequence
KHHVGVNEPHR

SEQ ID NO: 7269 - protein, 11 aa, Artificial
  IGFBP-2 heparin binding domain-containing peptide sequence
RHHVGVNEPHR

SEQ ID NO: 7270 - protein, 11 aa, Artificial
  IGFBP-2 heparin binding domain-containing peptide sequence
HHHVGVNEPHR

SEQ ID NO: 7271 - protein, 11 aa, Artificial
  IGFBP-2 heparin binding domain-containing peptide sequence
KKHVGVNEPHR

SEQ ID NO: 7272 - protein, 11 aa, Artificial
  IGFBP-2 heparin binding domain-containing peptide sequence
RKHVGVNEPHR

SEQ ID NO: 7273 - protein, 11 aa, Artificial
  IGFBP-2 heparin binding domain-containing peptide sequence
HKHVGVNEPHR

SEQ ID NO: 7274 - protein, 11 aa, Artificial
  IGFBP-2 heparin binding domain-containing peptide sequence
KRHVGVNEPHR

SEQ ID NO: 7275 - protein, 11 aa, Artificial
  IGFBP-2 heparin binding domain-containing peptide sequence
RRHVGVNEPHR

SEQ ID NO: 7276 - protein, 11 aa, Artificial
  IGFBP-2 heparin binding domain-containing peptide sequence
HRHVGVNEPHR

SEQ ID NO: 7277 - protein, 11 aa, Artificial
  IGFBP-2 heparin binding domain-containing peptide sequence
KHKVGVNEPHR

SEQ ID NO: 7278 - protein, 11 aa, Artificial
  IGFBP-2 heparin binding domain-containing peptide sequence
RHKVGVNEPHR

SEQ ID NO: 7279 - protein, 11 aa, Artificial
  IGFBP-2 heparin binding domain-containing peptide sequence
HHKVGVNEPHR

SEQ ID NO: 7280 - protein, 11 aa, Artificial
  IGFBP-2 heparin binding domain-containing peptide sequence
KKKVGVNEPHR

SEQ ID NO: 7281 - protein, 11 aa, Artificial
  IGFBP-2 heparin binding domain-containing peptide sequence
RKKVGVNEPHR

SEQ ID NO: 7282 - protein, 11 aa, Artificial
  IGFBP-2 heparin binding domain-containing peptide sequence
HKKVGVNEPHR

SEQ ID NO: 7283 - protein, 11 aa, Artificial
  IGFBP-2 heparin binding domain-containing peptide sequence
KRKVGVNEPHR

SEQ ID NO: 7284 - protein, 11 aa, Artificial
  IGFBP-2 heparin binding domain-containing peptide sequence
RRKVGVNEPHR

SEQ ID NO: 7285 - protein, 11 aa, Artificial
  IGFBP-2 heparin binding domain-containing peptide sequence
HRKVGVNEPHR

SEQ ID NO: 7286 - protein, 11 aa, Artificial
  IGFBP-2 heparin binding domain-containing peptide sequence
KHRVGVNEPHR

SEQ ID NO: 7287 - protein, 11 aa, Artificial
  IGFBP-2 heparin binding domain-containing peptide sequence
RHRVGVNEPHR

SEQ ID NO: 7288 - protein, 11 aa, Artificial
  IGFBP-2 heparin binding domain-containing peptide sequence
HHRVGVNEPHR

SEQ ID NO: 7289 - protein, 11 aa, Artificial
  IGFBP-2 heparin binding domain-containing peptide sequence
KKRVGVNEPHR

SEQ ID NO: 7290 - protein, 11 aa, Artificial
  IGFBP-2 heparin binding domain-containing peptide sequence
RKRVGVNEPHR

SEQ ID NO: 7291 - protein, 11 aa, Artificial
  IGFBP-2 heparin binding domain-containing peptide sequence
HKRVGVNEPHR

SEQ ID NO: 7292 - protein, 11 aa, Artificial
  IGFBP-2 heparin binding domain-containing peptide sequence
KRRVGVNEPHR

SEQ ID NO: 7293 - protein, 11 aa, Artificial
  IGFBP-2 heparin binding domain-containing peptide sequence
RRRVGVNEPHR

SEQ ID NO: 7294 - protein, 11 aa, Artificial
  IGFBP-2 heparin binding domain-containing peptide sequence
HRRVGVNEPHR

SEQ ID NO: 7295 - protein, 11 aa, Artificial
  IGFBP-2 heparin binding domain-containing peptide sequence
KHHLGLENPHR

SEQ ID NO: 7296 - protein, 11 aa, Artificial
  IGFBP-2 heparin binding domain-containing peptide sequence
RHHLGLENPHR

SEQ ID NO: 7297 - protein, 11 aa, Artificial
  IGFBP-2 heparin binding domain-containing peptide sequence
HHHLGLENPHR

SEQ ID NO: 7298 - protein, 11 aa, Artificial
  IGFBP-2 heparin binding domain-containing peptide sequence
KKHLGLENPHR

SEQ ID NO: 7299 - protein, 11 aa, Artificial
  IGFBP-2 heparin binding domain-containing peptide sequence
RKHLGLENPHR

SEQ ID NO: 7300 - protein, 11 aa, Artificial
  IGFBP-2 heparin binding domain-containing peptide sequence
HKHLGLENPHR

SEQ ID NO: 7301 - protein, 11 aa, Artificial
  IGFBP-2 heparin binding domain-containing peptide sequence
KRHLGLENPHR

SEQ ID NO: 7302 - protein, 11 aa, Artificial
  IGFBP-2 heparin binding domain-containing peptide sequence
RRHLGLENPHR

SEQ ID NO: 7303 - protein, 11 aa, Artificial
  IGFBP-2 heparin binding domain-containing peptide sequence
HRHLGLENPHR

SEQ ID NO: 7304 - protein, 11 aa, Artificial
  IGFBP-2 heparin binding domain-containing peptide sequence
KHKLGLENPHR

SEQ ID NO: 7305 - protein, 11 aa, Artificial
  IGFBP-2 heparin binding domain-containing peptide sequence
RHKLGLENPHR

SEQ ID NO: 7306 - protein, 11 aa, Artificial
  IGFBP-2 heparin binding domain-containing peptide sequence
HHKLGLENPHR

SEQ ID NO: 7307 - protein, 11 aa, Artificial
  IGFBP-2 heparin binding domain-containing peptide sequence
KKKLGLENPHR

SEQ ID NO: 7308 - protein, 11 aa, Artificial
  IGFBP-2 heparin binding domain-containing peptide sequence
RKKLGLENPHR

SEQ ID NO: 7309 - protein, 11 aa, Artificial
  IGFBP-2 heparin binding domain-containing peptide sequence
HKKLGLENPHR

SEQ ID NO: 7310 - protein, 11 aa, Artificial
  IGFBP-2 heparin binding domain-containing peptide sequence
KRKLGLENPHR

SEQ ID NO: 7311 - protein, 11 aa, Artificial
  IGFBP-2 heparin binding domain-containing peptide sequence
RRKLGLENPHR

SEQ ID NO: 7312 - protein, 11 aa, Artificial
  IGFBP-2 heparin binding domain-containing peptide sequence
HRKLGLENPHR

SEQ ID NO: 7313 - protein, 11 aa, Artificial
  IGFBP-2 heparin binding domain-containing peptide sequence
KHRLGLENPHR

SEQ ID NO: 7314 - protein, 11 aa, Artificial
  IGFBP-2 heparin binding domain-containing peptide sequence
RHRLGLENPHR

SEQ ID NO: 7315 - protein, 11 aa, Artificial
  IGFBP-2 heparin binding domain-containing peptide sequence
HHRLGLENPHR

SEQ ID NO: 7316 - protein, 11 aa, Artificial
  IGFBP-2 heparin binding domain-containing peptide sequence
KKRLGLENPHR

SEQ ID NO: 7317 - protein, 11 aa, Artificial
  IGFBP-2 heparin binding domain-containing peptide sequence
RKRLGLENPHR

SEQ ID NO: 7318 - protein, 11 aa, Artificial
  IGFBP-2 heparin binding domain-containing peptide sequence
HKRLGLENPHR

SEQ ID NO: 7319 - protein, 11 aa, Artificial
  IGFBP-2 heparin binding domain-containing peptide sequence
KRRLGLENPHR

SEQ ID NO: 7320 - protein, 11 aa, Artificial
  IGFBP-2 heparin binding domain-containing peptide sequence
RRRLGLENPHR

SEQ ID NO: 7321 - protein, 11 aa, Artificial
  IGFBP-2 heparin binding domain-containing peptide sequence
HRRLGLENPHR

SEQ ID NO: 7322 - protein, 11 aa, Artificial
  IGFBP-2 heparin binding domain-containing peptide sequence
KHHIGLENPHR

SEQ ID NO: 7323 - protein, 11 aa, Artificial
  IGFBP-2 heparin binding domain-containing peptide sequence
RHHIGLENPHR

SEQ ID NO: 7324 - protein, 11 aa, Artificial
  IGFBP-2 heparin binding domain-containing peptide sequence
HHHIGLENPHR

SEQ ID NO: 7325 - protein, 11 aa, Artificial
  IGFBP-2 heparin binding domain-containing peptide sequence
KKHIGLENPHR

SEQ ID NO: 7326 - protein, 11 aa, Artificial
  IGFBP-2 heparin binding domain-containing peptide sequence
RKHIGLENPHR

SEQ ID NO: 7327 - protein, 11 aa, Artificial
  IGFBP-2 heparin binding domain-containing peptide sequence
HKHIGLENPHR

SEQ ID NO: 7328 - protein, 11 aa, Artificial
  IGFBP-2 heparin binding domain-containing peptide sequence
KRHIGLENPHR

SEQ ID NO: 7329 - protein, 11 aa, Artificial
  IGFBP-2 heparin binding domain-containing peptide sequence
RRHIGLENPHR

SEQ ID NO: 7330 - protein, 11 aa, Artificial
  IGFBP-2 heparin binding domain-containing peptide sequence
HRHIGLENPHR

SEQ ID NO: 7331 - protein, 11 aa, Artificial
  IGFBP-2 heparin binding domain-containing peptide sequence
KHKIGLENPHR

SEQ ID NO: 7332 - protein, 11 aa, Artificial
  IGFBP-2 heparin binding domain-containing peptide sequence
RHKIGLENPHR

SEQ ID NO: 7333 - protein, 11 aa, Artificial
  IGFBP-2 heparin binding domain-containing peptide sequence
HHKIGLENPHR

SEQ ID NO: 7334 - protein, 11 aa, Artificial
  IGFBP-2 heparin binding domain-containing peptide sequence
KKKIGLENPHR

SEQ ID NO: 7335 - protein, 11 aa, Artificial
  IGFBP-2 heparin binding domain-containing peptide sequence
RKKIGLENPHR

SEQ ID NO: 7336 - protein, 11 aa, Artificial
  IGFBP-2 heparin binding domain-containing peptide sequence
HKKIGLENPHR

SEQ ID NO: 7337 - protein, 11 aa, Artificial
  IGFBP-2 heparin binding domain-containing peptide sequence
KRKIGLENPHR

SEQ ID NO: 7338 - protein, 11 aa, Artificial
  IGFBP-2 heparin binding domain-containing peptide sequence
RRKIGLENPHR

SEQ ID NO: 7339 - protein, 11 aa, Artificial
  IGFBP-2 heparin binding domain-containing peptide sequence
HRKIGLENPHR

SEQ ID NO: 7340 - protein, 11 aa, Artificial
  IGFBP-2 heparin binding domain-containing peptide sequence
KHRIGLENPHR

SEQ ID NO: 7341 - protein, 11 aa, Artificial
  IGFBP-2 heparin binding domain-containing peptide sequence
RHRIGLENPHR

SEQ ID NO: 7342 - protein, 11 aa, Artificial
  IGFBP-2 heparin binding domain-containing peptide sequence
HHRIGLENPHR

SEQ ID NO: 7343 - protein, 11 aa, Artificial
  IGFBP-2 heparin binding domain-containing peptide sequence
KKRIGLENPHR

SEQ ID NO: 7344 - protein, 11 aa, Artificial
  IGFBP-2 heparin binding domain-containing peptide sequence
RKRIGLENPHR

SEQ ID NO: 7345 - protein, 11 aa, Artificial
  IGFBP-2 heparin binding domain-containing peptide sequence
HKRIGLENPHR

SEQ ID NO: 7346 - protein, 11 aa, Artificial
  IGFBP-2 heparin binding domain-containing peptide sequence
KRRIGLENPHR

SEQ ID NO: 7347 - protein, 11 aa, Artificial
  IGFBP-2 heparin binding domain-containing peptide sequence
RRRIGLENPHR

SEQ ID NO: 7348 - protein, 11 aa, Artificial
  IGFBP-2 heparin binding domain-containing peptide sequence
HRRIGLENPHR

SEQ ID NO: 7349 - protein, 11 aa, Artificial
  IGFBP-2 heparin binding domain-containing peptide sequence
KHHVGLENPHR

SEQ ID NO: 7350 - protein, 11 aa, Artificial
  IGFBP-2 heparin binding domain-containing peptide sequence
RHHVGLENPHR

SEQ ID NO: 7351 - protein, 11 aa, Artificial
  IGFBP-2 heparin binding domain-containing peptide sequence
HHHVGLENPHR

SEQ ID NO: 7352 - protein, 11 aa, Artificial
  IGFBP-2 heparin binding domain-containing peptide sequence
KKHVGLENPHR

SEQ ID NO: 7353 - protein, 11 aa, Artificial
  IGFBP-2 heparin binding domain-containing peptide sequence
RKHVGLENPHR

SEQ ID NO: 7354 - protein, 11 aa, Artificial
  IGFBP-2 heparin binding domain-containing peptide sequence
HKHVGLENPHR

SEQ ID NO: 7355 - protein, 11 aa, Artificial
  IGFBP-2 heparin binding domain-containing peptide sequence
KRHVGLENPHR

SEQ ID NO: 7356 - protein, 11 aa, Artificial
  IGFBP-2 heparin binding domain-containing peptide sequence
RRHVGLENPHR

SEQ ID NO: 7357 - protein, 11 aa, Artificial
  IGFBP-2 heparin binding domain-containing peptide sequence
HRHVGLENPHR

SEQ ID NO: 7358 - protein, 11 aa, Artificial
  IGFBP-2 heparin binding domain-containing peptide sequence
KHKVGLENPHR

SEQ ID NO: 7359 - protein, 11 aa, Artificial
  IGFBP-2 heparin binding domain-containing peptide sequence
RHKVGLENPHR

SEQ ID NO: 7360 - protein, 11 aa, Artificial
  IGFBP-2 heparin binding domain-containing peptide sequence
HHKVGLENPHR

SEQ ID NO: 7361 - protein, 11 aa, Artificial
  IGFBP-2 heparin binding domain-containing peptide sequence
KKKVGLENPHR

SEQ ID NO: 7362 - protein, 11 aa, Artificial
  IGFBP-2 heparin binding domain-containing peptide sequence
RKKVGLENPHR

SEQ ID NO: 7363 - protein, 11 aa, Artificial
  IGFBP-2 heparin binding domain-containing peptide sequence
HKKVGLENPHR

SEQ ID NO: 7364 - protein, 11 aa, Artificial
  IGFBP-2 heparin binding domain-containing peptide sequence
KRKVGLENPHR

SEQ ID NO: 7365 - protein, 11 aa, Artificial
  IGFBP-2 heparin binding domain-containing peptide sequence
RRKVGLENPHR

SEQ ID NO: 7366 - protein, 11 aa, Artificial
  IGFBP-2 heparin binding domain-containing peptide sequence
HRKVGLENPHR

SEQ ID NO: 7367 - protein, 11 aa, Artificial
  IGFBP-2 heparin binding domain-containing peptide sequence
KHRVGLENPHR

SEQ ID NO: 7368 - protein, 11 aa, Artificial
  IGFBP-2 heparin binding domain-containing peptide sequence
RHRVGLENPHR

SEQ ID NO: 7369 - protein, 11 aa, Artificial
  IGFBP-2 heparin binding domain-containing peptide sequence
HHRVGLENPHR

SEQ ID NO: 7370 - protein, 11 aa, Artificial
  IGFBP-2 heparin binding domain-containing peptide sequence
KKRVGLENPHR

SEQ ID NO: 7371 - protein, 11 aa, Artificial
  IGFBP-2 heparin binding domain-containing peptide sequence
RKRVGLENPHR

SEQ ID NO: 7372 - protein, 11 aa, Artificial
  IGFBP-2 heparin binding domain-containing peptide sequence
HKRVGLENPHR

SEQ ID NO: 7373 - protein, 11 aa, Artificial
  IGFBP-2 heparin binding domain-containing peptide sequence
KRRVGLENPHR

SEQ ID NO: 7374 - protein, 11 aa, Artificial
  IGFBP-2 heparin binding domain-containing peptide sequence
RRRVGLENPHR

SEQ ID NO: 7375 - protein, 11 aa, Artificial
  IGFBP-2 heparin binding domain-containing peptide sequence
HRRVGLENPHR

SEQ ID NO: 7376 - protein, 11 aa, Artificial
  IGFBP-2 heparin binding domain-containing peptide sequence
KHHLGIENPHR

SEQ ID NO: 7377 - protein, 11 aa, Artificial
  IGFBP-2 heparin binding domain-containing peptide sequence
RHHLGIENPHR

SEQ ID NO: 7378 - protein, 11 aa, Artificial
  IGFBP-2 heparin binding domain-containing peptide sequence
HHHLGIENPHR

SEQ ID NO: 7379 - protein, 11 aa, Artificial
  IGFBP-2 heparin binding domain-containing peptide sequence
KKHLGIENPHR

SEQ ID NO: 7380 - protein, 11 aa, Artificial
  IGFBP-2 heparin binding domain-containing peptide sequence
RKHLGIENPHR

SEQ ID NO: 7381 - protein, 11 aa, Artificial
  IGFBP-2 heparin binding domain-containing peptide sequence
HKHLGIENPHR

SEQ ID NO: 7382 - protein, 11 aa, Artificial
  IGFBP-2 heparin binding domain-containing peptide sequence
KRHLGIENPHR

SEQ ID NO: 7383 - protein, 11 aa, Artificial
  IGFBP-2 heparin binding domain-containing peptide sequence
RRHLGIENPHR

SEQ ID NO: 7384 - protein, 11 aa, Artificial
  IGFBP-2 heparin binding domain-containing peptide sequence
HRHLGIENPHR

SEQ ID NO: 7385 - protein, 11 aa, Artificial
  IGFBP-2 heparin binding domain-containing peptide sequence
KHKLGIENPHR

SEQ ID NO: 7386 - protein, 11 aa, Artificial
  IGFBP-2 heparin binding domain-containing peptide sequence
RHKLGIENPHR

SEQ ID NO: 7387 - protein, 11 aa, Artificial
  IGFBP-2 heparin binding domain-containing peptide sequence
HHKLGIENPHR

SEQ ID NO: 7388 - protein, 11 aa, Artificial
  IGFBP-2 heparin binding domain-containing peptide sequence
KKKLGIENPHR

SEQ ID NO: 7389 - protein, 11 aa, Artificial
  IGFBP-2 heparin binding domain-containing peptide sequence
RKKLGIENPHR

SEQ ID NO: 7390 - protein, 11 aa, Artificial
  IGFBP-2 heparin binding domain-containing peptide sequence
HKKLGIENPHR

SEQ ID NO: 7391 - protein, 11 aa, Artificial
  IGFBP-2 heparin binding domain-containing peptide sequence
KRKLGIENPHR

SEQ ID NO: 7392 - protein, 11 aa, Artificial
  IGFBP-2 heparin binding domain-containing peptide sequence
RRKLGIENPHR

SEQ ID NO: 7393 - protein, 11 aa, Artificial
  IGFBP-2 heparin binding domain-containing peptide sequence
HRKLGIENPHR

SEQ ID NO: 7394 - protein, 11 aa, Artificial
  IGFBP-2 heparin binding domain-containing peptide sequence
KHRLGIENPHR

SEQ ID NO: 7395 - protein, 11 aa, Artificial
  IGFBP-2 heparin binding domain-containing peptide sequence
RHRLGIENPHR

SEQ ID NO: 7396 - protein, 11 aa, Artificial
  IGFBP-2 heparin binding domain-containing peptide sequence
HHRLGIENPHR

SEQ ID NO: 7397 - protein, 11 aa, Artificial
  IGFBP-2 heparin binding domain-containing peptide sequence
KKRLGIENPHR

SEQ ID NO: 7398 - protein, 11 aa, Artificial
  IGFBP-2 heparin binding domain-containing peptide sequence
RKRLGIENPHR

SEQ ID NO: 7399 - protein, 11 aa, Artificial
  IGFBP-2 heparin binding domain-containing peptide sequence
HKRLGIENPHR

SEQ ID NO: 7400 - protein, 11 aa, Artificial
  IGFBP-2 heparin binding domain-containing peptide sequence
KRRLGIENPHR

SEQ ID NO: 7401 - protein, 11 aa, Artificial
  IGFBP-2 heparin binding domain-containing peptide sequence
RRRLGIENPHR

SEQ ID NO: 7402 - protein, 11 aa, Artificial
  IGFBP-2 heparin binding domain-containing peptide sequence
HRRLGIENPHR

SEQ ID NO: 7403 - protein, 11 aa, Artificial
  IGFBP-2 heparin binding domain-containing peptide sequence
KHHIGIENPHR

SEQ ID NO: 7404 - protein, 11 aa, Artificial
  IGFBP-2 heparin binding domain-containing peptide sequence
RHHIGIENPHR

SEQ ID NO: 7405 - protein, 11 aa, Artificial
  IGFBP-2 heparin binding domain-containing peptide sequence
HHHIGIENPHR

SEQ ID NO: 7406 - protein, 11 aa, Artificial
  IGFBP-2 heparin binding domain-containing peptide sequence
KKHIGIENPHR

SEQ ID NO: 7407 - protein, 11 aa, Artificial
  IGFBP-2 heparin binding domain-containing peptide sequence
RKHIGIENPHR

SEQ ID NO: 7408 - protein, 11 aa, Artificial
  IGFBP-2 heparin binding domain-containing peptide sequence
HKHIGIENPHR

SEQ ID NO: 7409 - protein, 11 aa, Artificial
  IGFBP-2 heparin binding domain-containing peptide sequence
KRHIGIENPHR

SEQ ID NO: 7410 - protein, 11 aa, Artificial
  IGFBP-2 heparin binding domain-containing peptide sequence
RRHIGIENPHR

SEQ ID NO: 7411 - protein, 11 aa, Artificial
  IGFBP-2 heparin binding domain-containing peptide sequence
HRHIGIENPHR

SEQ ID NO: 7412 - protein, 11 aa, Artificial
  IGFBP-2 heparin binding domain-containing peptide sequence
KHKIGIENPHR

SEQ ID NO: 7413 - protein, 11 aa, Artificial
  IGFBP-2 heparin binding domain-containing peptide sequence
RHKIGIENPHR

SEQ ID NO: 7414 - protein, 11 aa, Artificial
  IGFBP-2 heparin binding domain-containing peptide sequence
HHKIGIENPHR

SEQ ID NO: 7415 - protein, 11 aa, Artificial
  IGFBP-2 heparin binding domain-containing peptide sequence
KKKIGIENPHR

SEQ ID NO: 7416 - protein, 11 aa, Artificial
  IGFBP-2 heparin binding domain-containing peptide sequence
RKKIGIENPHR

SEQ ID NO: 7417 - protein, 11 aa, Artificial
  IGFBP-2 heparin binding domain-containing peptide sequence
HKKIGIENPHR

SEQ ID NO: 7418 - protein, 11 aa, Artificial
  IGFBP-2 heparin binding domain-containing peptide sequence
KRKIGIENPHR

SEQ ID NO: 7419 - protein, 11 aa, Artificial
  IGFBP-2 heparin binding domain-containing peptide sequence
RRKIGIENPHR

SEQ ID NO: 7420 - protein, 11 aa, Artificial
  IGFBP-2 heparin binding domain-containing peptide sequence
HRKIGIENPHR

SEQ ID NO: 7421 - protein, 11 aa, Artificial
  IGFBP-2 heparin binding domain-containing peptide sequence
KHRIGIENPHR

SEQ ID NO: 7422 - protein, 11 aa, Artificial
  IGFBP-2 heparin binding domain-containing peptide sequence
RHRIGIENPHR

SEQ ID NO: 7423 - protein, 11 aa, Artificial
  IGFBP-2 heparin binding domain-containing peptide sequence
HHRIGIENPHR

SEQ ID NO: 7424 - protein, 11 aa, Artificial
  IGFBP-2 heparin binding domain-containing peptide sequence
KKRIGIENPHR

SEQ ID NO: 7425 - protein, 11 aa, Artificial
  IGFBP-2 heparin binding domain-containing peptide sequence
RKRIGIENPHR

SEQ ID NO: 7426 - protein, 11 aa, Artificial
  IGFBP-2 heparin binding domain-containing peptide sequence
HKRIGIENPHR

SEQ ID NO: 7427 - protein, 11 aa, Artificial
  IGFBP-2 heparin binding domain-containing peptide sequence
KRRIGIENPHR

SEQ ID NO: 7428 - protein, 11 aa, Artificial
  IGFBP-2 heparin binding domain-containing peptide sequence
RRRIGIENPHR

SEQ ID NO: 7429 - protein, 11 aa, Artificial
  IGFBP-2 heparin binding domain-containing peptide sequence
HRRIGIENPHR

SEQ ID NO: 7430 - protein, 11 aa, Artificial
  IGFBP-2 heparin binding domain-containing peptide sequence
KHHVGIENPHR

SEQ ID NO: 7431 - protein, 11 aa, Artificial
  IGFBP-2 heparin binding domain-containing peptide sequence
RHHVGIENPHR

SEQ ID NO: 7432 - protein, 11 aa, Artificial
  IGFBP-2 heparin binding domain-containing peptide sequence
HHHVGIENPHR

SEQ ID NO: 7433 - protein, 11 aa, Artificial
  IGFBP-2 heparin binding domain-containing peptide sequence
KKHVGIENPHR

SEQ ID NO: 7434 - protein, 11 aa, Artificial
  IGFBP-2 heparin binding domain-containing peptide sequence
RKHVGIENPHR

SEQ ID NO: 7435 - protein, 11 aa, Artificial
  IGFBP-2 heparin binding domain-containing peptide sequence
HKHVGIENPHR

SEQ ID NO: 7436 - protein, 11 aa, Artificial
  IGFBP-2 heparin binding domain-containing peptide sequence
KRHVGIENPHR

SEQ ID NO: 7437 - protein, 11 aa, Artificial
  IGFBP-2 heparin binding domain-containing peptide sequence
RRHVGIENPHR

SEQ ID NO: 7438 - protein, 11 aa, Artificial
  IGFBP-2 heparin binding domain-containing peptide sequence
HRHVGIENPHR

SEQ ID NO: 7439 - protein, 11 aa, Artificial
  IGFBP-2 heparin binding domain-containing peptide sequence
KHKVGIENPHR

SEQ ID NO: 7440 - protein, 11 aa, Artificial
  IGFBP-2 heparin binding domain-containing peptide sequence
RHKVGIENPHR

SEQ ID NO: 7441 - protein, 11 aa, Artificial
  IGFBP-2 heparin binding domain-containing peptide sequence
HHKVGIENPHR

SEQ ID NO: 7442 - protein, 11 aa, Artificial
  IGFBP-2 heparin binding domain-containing peptide sequence
KKKVGIENPHR

SEQ ID NO: 7443 - protein, 11 aa, Artificial
  IGFBP-2 heparin binding domain-containing peptide sequence
RKKVGIENPHR

SEQ ID NO: 7444 - protein, 11 aa, Artificial
  IGFBP-2 heparin binding domain-containing peptide sequence
HKKVGIENPHR

SEQ ID NO: 7445 - protein, 11 aa, Artificial
  IGFBP-2 heparin binding domain-containing peptide sequence
KRKVGIENPHR

SEQ ID NO: 7446 - protein, 11 aa, Artificial
  IGFBP-2 heparin binding domain-containing peptide sequence
RRKVGIENPHR

SEQ ID NO: 7447 - protein, 11 aa, Artificial
  IGFBP-2 heparin binding domain-containing peptide sequence
HRKVGIENPHR

SEQ ID NO: 7448 - protein, 11 aa, Artificial
  IGFBP-2 heparin binding domain-containing peptide sequence
KHRVGIENPHR

SEQ ID NO: 7449 - protein, 11 aa, Artificial
  IGFBP-2 heparin binding domain-containing peptide sequence
RHRVGIENPHR

SEQ ID NO: 7450 - protein, 11 aa, Artificial
  IGFBP-2 heparin binding domain-containing peptide sequence
HHRVGIENPHR

SEQ ID NO: 7451 - protein, 11 aa, Artificial
  IGFBP-2 heparin binding domain-containing peptide sequence
KKRVGIENPHR

SEQ ID NO: 7452 - protein, 11 aa, Artificial
  IGFBP-2 heparin binding domain-containing peptide sequence
RKRVGIENPHR

SEQ ID NO: 7453 - protein, 11 aa, Artificial
  IGFBP-2 heparin binding domain-containing peptide sequence
HKRVGIENPHR

SEQ ID NO: 7454 - protein, 11 aa, Artificial
  IGFBP-2 heparin binding domain-containing peptide sequence
KRRVGIENPHR

SEQ ID NO: 7455 - protein, 11 aa, Artificial
  IGFBP-2 heparin binding domain-containing peptide sequence
RRRVGIENPHR

SEQ ID NO: 7456 - protein, 11 aa, Artificial
  IGFBP-2 heparin binding domain-containing peptide sequence
HRRVGIENPHR

SEQ ID NO: 7457 - protein, 11 aa, Artificial
  IGFBP-2 heparin binding domain-containing peptide sequence
KHHLGVENPHR

SEQ ID NO: 7458 - protein, 11 aa, Artificial
  IGFBP-2 heparin binding domain-containing peptide sequence
RHHLGVENPHR

SEQ ID NO: 7459 - protein, 11 aa, Artificial
  IGFBP-2 heparin binding domain-containing peptide sequence
HHHLGVENPHR

SEQ ID NO: 7460 - protein, 11 aa, Artificial
  IGFBP-2 heparin binding domain-containing peptide sequence
KKHLGVENPHR

SEQ ID NO: 7461 - protein, 11 aa, Artificial
  IGFBP-2 heparin binding domain-containing peptide sequence
RKHLGVENPHR

SEQ ID NO: 7462 - protein, 11 aa, Artificial
  IGFBP-2 heparin binding domain-containing peptide sequence
HKHLGVENPHR

SEQ ID NO: 7463 - protein, 11 aa, Artificial
  IGFBP-2 heparin binding domain-containing peptide sequence
KRHLGVENPHR

SEQ ID NO: 7464 - protein, 11 aa, Artificial
  IGFBP-2 heparin binding domain-containing peptide sequence
RRHLGVENPHR

SEQ ID NO: 7465 - protein, 11 aa, Artificial
  IGFBP-2 heparin binding domain-containing peptide sequence
HRHLGVENPHR

SEQ ID NO: 7466 - protein, 11 aa, Artificial
  IGFBP-2 heparin binding domain-containing peptide sequence
KHKLGVENPHR

SEQ ID NO: 7467 - protein, 11 aa, Artificial
  IGFBP-2 heparin binding domain-containing peptide sequence
RHKLGVENPHR

SEQ ID NO: 7468 - protein, 11 aa, Artificial
  IGFBP-2 heparin binding domain-containing peptide sequence
HHKLGVENPHR

SEQ ID NO: 7469 - protein, 11 aa, Artificial
  IGFBP-2 heparin binding domain-containing peptide sequence
KKKLGVENPHR

SEQ ID NO: 7470 - protein, 11 aa, Artificial
  IGFBP-2 heparin binding domain-containing peptide sequence
RKKLGVENPHR

SEQ ID NO: 7471 - protein, 11 aa, Artificial
  IGFBP-2 heparin binding domain-containing peptide sequence
HKKLGVENPHR

SEQ ID NO: 7472 - protein, 11 aa, Artificial
  IGFBP-2 heparin binding domain-containing peptide sequence
KRKLGVENPHR

SEQ ID NO: 7473 - protein, 11 aa, Artificial
  IGFBP-2 heparin binding domain-containing peptide sequence
RRKLGVENPHR

SEQ ID NO: 7474 - protein, 11 aa, Artificial
  IGFBP-2 heparin binding domain-containing peptide sequence
HRKLGVENPHR

SEQ ID NO: 7475 - protein, 11 aa, Artificial
  IGFBP-2 heparin binding domain-containing peptide sequence
KHRLGVENPHR

SEQ ID NO: 7476 - protein, 11 aa, Artificial
  IGFBP-2 heparin binding domain-containing peptide sequence
RHRLGVENPHR

SEQ ID NO: 7477 - protein, 11 aa, Artificial
  IGFBP-2 heparin binding domain-containing peptide sequence
HHRLGVENPHR

SEQ ID NO: 7478 - protein, 11 aa, Artificial
  IGFBP-2 heparin binding domain-containing peptide sequence
KKRLGVENPHR

SEQ ID NO: 7479 - protein, 11 aa, Artificial
  IGFBP-2 heparin binding domain-containing peptide sequence
RKRLGVENPHR

SEQ ID NO: 7480 - protein, 11 aa, Artificial
  IGFBP-2 heparin binding domain-containing peptide sequence
HKRLGVENPHR

SEQ ID NO: 7481 - protein, 11 aa, Artificial
  IGFBP-2 heparin binding domain-containing peptide sequence
KRRLGVENPHR

SEQ ID NO: 7482 - protein, 11 aa, Artificial
  IGFBP-2 heparin binding domain-containing peptide sequence
RRRLGVENPHR

SEQ ID NO: 7483 - protein, 11 aa, Artificial
  IGFBP-2 heparin binding domain-containing peptide sequence
HRRLGVENPHR

SEQ ID NO: 7484 - protein, 11 aa, Artificial
  IGFBP-2 heparin binding domain-containing peptide sequence
KHHIGVENPHR

SEQ ID NO: 7485 - protein, 11 aa, Artificial
  IGFBP-2 heparin binding domain-containing peptide sequence
RHHIGVEEPHR

SEQ ID NO: 7486 - protein, 11 aa, Artificial
  IGFBP-2 heparin binding domain-containing peptide sequence
HHHIGVENPHR

SEQ ID NO: 7487 - protein, 11 aa, Artificial
  IGFBP-2 heparin binding domain-containing peptide sequence
KKHIGVENPHR

SEQ ID NO: 7488 - protein, 11 aa, Artificial
  IGFBP-2 heparin binding domain-containing peptide sequence
RKHIGVENPHR

SEQ ID NO: 7489 - protein, 11 aa, Artificial
  IGFBP-2 heparin binding domain-containing peptide sequence
HKHIGVENPHR

SEQ ID NO: 7490 - protein, 11 aa, Artificial
  IGFBP-2 heparin binding domain-containing peptide sequence
KRHIGVENPHR

SEQ ID NO: 7491 - protein, 11 aa, Artificial
  IGFBP-2 heparin binding domain-containing peptide sequence
RRHIGVENPHR

SEQ ID NO: 7492 - protein, 11 aa, Artificial
  IGFBP-2 heparin binding domain-containing peptide sequence
HRHIGVENPHR

SEQ ID NO: 7493 - protein, 11 aa, Artificial
  IGFBP-2 heparin binding domain-containing peptide sequence
KHKIGVENPHR

SEQ ID NO: 7494 - protein, 11 aa, Artificial
  IGFBP-2 heparin binding domain-containing peptide sequence
RHKIGVENPHR

SEQ ID NO: 7495 - protein, 11 aa, Artificial
  IGFBP-2 heparin binding domain-containing peptide sequence
HHKIGVENPHR

SEQ ID NO: 7496 - protein, 11 aa, Artificial
  IGFBP-2 heparin binding domain-containing peptide sequence
KKKIGVENPHR

SEQ ID NO: 7497 - protein, 11 aa, Artificial
  IGFBP-2 heparin binding domain-containing peptide sequence
RKKIGVENPHR

SEQ ID NO: 7498 - protein, 11 aa, Artificial
  IGFBP-2 heparin binding domain-containing peptide sequence
HKKIGVENPHR

SEQ ID NO: 7499 - protein, 11 aa, Artificial
  IGFBP-2 heparin binding domain-containing peptide sequence
KRKIGVENPHR

SEQ ID NO: 7500 - protein, 11 aa, Artificial
  IGFBP-2 heparin binding domain-containing peptide sequence
RRKIGVENPHR

SEQ ID NO: 7501 - protein, 11 aa, Artificial
  IGFBP-2 heparin binding domain-containing peptide sequence
HRKIGVENPHR

SEQ ID NO: 7502 - protein, 11 aa, Artificial
  IGFBP-2 heparin binding domain-containing peptide sequence
KHRIGVENPHR

SEQ ID NO: 7503 - protein, 11 aa, Artificial
  IGFBP-2 heparin binding domain-containing peptide sequence
RHRIGVENPHR

SEQ ID NO: 7504 - protein, 11 aa, Artificial
  IGFBP-2 heparin binding domain-containing peptide sequence
HHRIGVENPHR

SEQ ID NO: 7505 - protein, 11 aa, Artificial
  IGFBP-2 heparin binding domain-containing peptide sequence
KKRIGVENPHR

SEQ ID NO: 7506 - protein, 11 aa, Artificial
  IGFBP-2 heparin binding domain-containing peptide sequence
RKRIGVENPHR

SEQ ID NO: 7507 - protein, 11 aa, Artificial
  IGFBP-2 heparin binding domain-containing peptide sequence
HKRIGVENPHR

SEQ ID NO: 7508 - protein, 11 aa, Artificial
  IGFBP-2 heparin binding domain-containing peptide sequence
KRRIGVENPHR

SEQ ID NO: 7509 - protein, 11 aa, Artificial
  IGFBP-2 heparin binding domain-containing peptide sequence
RRRIGVENPHR

SEQ ID NO: 7510 - protein, 11 aa, Artificial
  IGFBP-2 heparin binding domain-containing peptide sequence
HRRIGVENPHR

SEQ ID NO: 7511 - protein, 11 aa, Artificial
  IGFBP-2 heparin binding domain-containing peptide sequence
KHHVGVENPHR

SEQ ID NO: 7512 - protein, 11 aa, Artificial
  IGFBP-2 heparin binding domain-containing peptide sequence
RHHVGVENPHR

SEQ ID NO: 7513 - protein, 11 aa, Artificial
  IGFBP-2 heparin binding domain-containing peptide sequence
HHHVGVENPHR

SEQ ID NO: 7514 - protein, 11 aa, Artificial
  IGFBP-2 heparin binding domain-containing peptide sequence
KKHVGVENPHR

SEQ ID NO: 7515 - protein, 11 aa, Artificial
  IGFBP-2 heparin binding domain-containing peptide sequence
RKHVGVENPHR

SEQ ID NO: 7516 - protein, 11 aa, Artificial
  IGFBP-2 heparin binding domain-containing peptide sequence
HKHVGVENPHR

SEQ ID NO: 7517 - protein, 11 aa, Artificial
  IGFBP-2 heparin binding domain-containing peptide sequence
KRHVGVENPHR

SEQ ID NO: 7518 - protein, 11 aa, Artificial
  IGFBP-2 heparin binding domain-containing peptide sequence
RRHVGVENPHR

SEQ ID NO: 7519 - protein, 11 aa, Artificial
  IGFBP-2 heparin binding domain-containing peptide sequence
HRHVGVENPHR

SEQ ID NO: 7520 - protein, 11 aa, Artificial
  IGFBP-2 heparin binding domain-containing peptide sequence
KHKVGVENPHR

SEQ ID NO: 7521 - protein, 11 aa, Artificial
  IGFBP-2 heparin binding domain-containing peptide sequence
RHKVGVENPHR

SEQ ID NO: 7522 - protein, 11 aa, Artificial
  IGFBP-2 heparin binding domain-containing peptide sequence
HHKVGVENPHR

SEQ ID NO: 7523 - protein, 11 aa, Artificial
  IGFBP-2 heparin binding domain-containing peptide sequence
KKKVGVENPHR

SEQ ID NO: 7524 - protein, 11 aa, Artificial
  IGFBP-2 heparin binding domain-containing peptide sequence
RKKVGVENPHR

SEQ ID NO: 7525 - protein, 11 aa, Artificial
  IGFBP-2 heparin binding domain-containing peptide sequence
HKKVGVENPHR

SEQ ID NO: 7526 - protein, 11 aa, Artificial
  IGFBP-2 heparin binding domain-containing peptide sequence
KRKVGVENPHR

SEQ ID NO: 7527 - protein, 11 aa, Artificial
  IGFBP-2 heparin binding domain-containing peptide sequence
RRKVGVEEPHR

SEQ ID NO: 7528 - protein, 11 aa, Artificial
  IGFBP-2 heparin binding domain-containing peptide sequence
HRKVGVENPHR

SEQ ID NO: 7529 - protein, 11 aa, Artificial
  IGFBP-2 heparin binding domain-containing peptide sequence
KHRVGVENPHR

SEQ ID NO: 7530 - protein, 11 aa, Artificial
  IGFBP-2 heparin binding domain-containing peptide sequence
RHRVGVENPHR

SEQ ID NO: 7531 - protein, 11 aa, Artificial
  IGFBP-2 heparin binding domain-containing peptide sequence
HHRVGVENPHR

SEQ ID NO: 7532 - protein, 11 aa, Artificial
  IGFBP-2 heparin binding domain-containing peptide sequence
KKRVGVENPHR

SEQ ID NO: 7533 - protein, 11 aa, Artificial
  IGFBP-2 heparin binding domain-containing peptide sequence
RKRVGVENPHR

SEQ ID NO: 7534 - protein, 11 aa, Artificial
  IGFBP-2 heparin binding domain-containing peptide sequence
HKRVGVENPHR

SEQ ID NO: 7535 - protein, 11 aa, Artificial
  IGFBP-2 heparin binding domain-containing peptide sequence
KRRVGVENPHR

SEQ ID NO: 7536 - protein, 11 aa, Artificial
  IGFBP-2 heparin binding domain-containing peptide sequence
RRRVGVENPHR

SEQ ID NO: 7537 - protein, 11 aa, Artificial
  IGFBP-2 heparin binding domain-containing peptide sequence
HRRVGVENPHR

SEQ ID NO: 7538 - protein, 11 aa, Artificial
  IGFBP-2 heparin binding domain-containing peptide sequence
KHHLGLNNPHR

SEQ ID NO: 7539 - protein, 11 aa, Artificial
  IGFBP-2 heparin binding domain-containing peptide sequence
RHHLGLNNPHR

SEQ ID NO: 7540 - protein, 11 aa, Artificial
  IGFBP-2 heparin binding domain-containing peptide sequence
HHHLGLNNPHR

SEQ ID NO: 7541 - protein, 11 aa, Artificial
  IGFBP-2 heparin binding domain-containing peptide sequence
KKHLGLNNPHR

SEQ ID NO: 7542 - protein, 11 aa, Artificial
  IGFBP-2 heparin binding domain-containing peptide sequence
RKHLGLNNPHR

SEQ ID NO: 7543 - protein, 11 aa, Artificial
  IGFBP-2 heparin binding domain-containing peptide sequence
HKHLGLNNPHR

SEQ ID NO: 7544 - protein, 11 aa, Artificial
  IGFBP-2 heparin binding domain-containing peptide sequence
KRHLGLNNPHR

SEQ ID NO: 7545 - protein, 11 aa, Artificial
  IGFBP-2 heparin binding domain-containing peptide sequence
RRHLGLNNPHR

SEQ ID NO: 7546 - protein, 11 aa, Artificial
  IGFBP-2 heparin binding domain-containing peptide sequence
HRHLGLNNPHR

SEQ ID NO: 7547 - protein, 11 aa, Artificial
  IGFBP-2 heparin binding domain-containing peptide sequence
KHKLGLNNPHR

SEQ ID NO: 7548 - protein, 11 aa, Artificial
  IGFBP-2 heparin binding domain-containing peptide sequence
RHKLGLNNPHR

SEQ ID NO: 7549 - protein, 11 aa, Artificial
  IGFBP-2 heparin binding domain-containing peptide sequence
HHKLGLNNPHR

SEQ ID NO: 7550 - protein, 11 aa, Artificial
  IGFBP-2 heparin binding domain-containing peptide sequence
KKKLGLNNPHR

SEQ ID NO: 7551 - protein, 11 aa, Artificial
  IGFBP-2 heparin binding domain-containing peptide sequence
RKKLGLNNPHR

SEQ ID NO: 7552 - protein, 11 aa, Artificial
  IGFBP-2 heparin binding domain-containing peptide sequence
HKKLGLNNPHR

SEQ ID NO: 7553 - protein, 11 aa, Artificial
  IGFBP-2 heparin binding domain-containing peptide sequence
KRKLGLNNPHR

SEQ ID NO: 7554 - protein, 11 aa, Artificial
  IGFBP-2 heparin binding domain-containing peptide sequence
RRKLGLNNPHR

SEQ ID NO: 7555 - protein, 11 aa, Artificial
  IGFBP-2 heparin binding domain-containing peptide sequence
HRKLGLNNPHR

SEQ ID NO: 7556 - protein, 11 aa, Artificial
  IGFBP-2 heparin binding domain-containing peptide sequence
KHRLGLNNPHR

SEQ ID NO: 7557 - protein, 11 aa, Artificial
  IGFBP-2 heparin binding domain-containing peptide sequence
RHRLGLNNPHR

SEQ ID NO: 7558 - protein, 11 aa, Artificial
  IGFBP-2 heparin binding domain-containing peptide sequence
HHRLGLNNPHR

SEQ ID NO: 7559 - protein, 11 aa, Artificial
  IGFBP-2 heparin binding domain-containing peptide sequence
KKRLGLNNPHR

SEQ ID NO: 7560 - protein, 11 aa, Artificial
  IGFBP-2 heparin binding domain-containing peptide sequence
RKRLGLNNPHR

SEQ ID NO: 7561 - protein, 11 aa, Artificial
  IGFBP-2 heparin binding domain-containing peptide sequence
HKRLGLNNPHR

SEQ ID NO: 7562 - protein, 11 aa, Artificial
  IGFBP-2 heparin binding domain-containing peptide sequence
KRRLGLNNPHR

SEQ ID NO: 7563 - protein, 11 aa, Artificial
  IGFBP-2 heparin binding domain-containing peptide sequence
RRRLGLNNPHR

SEQ ID NO: 7564 - protein, 11 aa, Artificial
  IGFBP-2 heparin binding domain-containing peptide sequence
HRRLGLNNPHR

SEQ ID NO: 7565 - protein, 11 aa, Artificial
  IGFBP-2 heparin binding domain-containing peptide sequence
KHHIGLNNPHR

SEQ ID NO: 7566 - protein, 11 aa, Artificial
  IGFBP-2 heparin binding domain-containing peptide sequence
RHHIGLNNPHR

SEQ ID NO: 7567 - protein, 11 aa, Artificial
  IGFBP-2 heparin binding domain-containing peptide sequence
HHHIGLNNPHR

SEQ ID NO: 7568 - protein, 11 aa, Artificial
  IGFBP-2 heparin binding domain-containing peptide sequence
KKHIGLNNPHR

SEQ ID NO: 7569 - protein, 11 aa, Artificial
  IGFBP-2 heparin binding domain-containing peptide sequence
RKHIGLNNPHR

SEQ ID NO: 7570 - protein, 11 aa, Artificial
  IGFBP-2 heparin binding domain-containing peptide sequence
HKHIGLNNPHR

SEQ ID NO: 7571 - protein, 11 aa, Artificial
  IGFBP-2 heparin binding domain-containing peptide sequence
KRHIGLNNPHR

SEQ ID NO: 7572 - protein, 11 aa, Artificial
  IGFBP-2 heparin binding domain-containing peptide sequence
RRHIGLNNPHR

SEQ ID NO: 7573 - protein, 11 aa, Artificial
  IGFBP-2 heparin binding domain-containing peptide sequence
HRHIGLNNPHR

SEQ ID NO: 7574 - protein, 11 aa, Artificial
  IGFBP-2 heparin binding domain-containing peptide sequence
KHKIGLNNPHR

SEQ ID NO: 7575 - protein, 11 aa, Artificial
  IGFBP-2 heparin binding domain-containing peptide sequence
RHKIGLNNPHR

SEQ ID NO: 7576 - protein, 11 aa, Artificial
  IGFBP-2 heparin binding domain-containing peptide sequence
HHKIGLNNPHR

SEQ ID NO: 7577 - protein, 11 aa, Artificial
  IGFBP-2 heparin binding domain-containing peptide sequence
KKKIGLNNPHR

SEQ ID NO: 7578 - protein, 11 aa, Artificial
  IGFBP-2 heparin binding domain-containing peptide sequence
RKKIGLNNPHR

SEQ ID NO: 7579 - protein, 11 aa, Artificial
  IGFBP-2 heparin binding domain-containing peptide sequence
HKKIGLNNPHR

SEQ ID NO: 7580 - protein, 11 aa, Artificial
  IGFBP-2 heparin binding domain-containing peptide sequence
KRKIGLNNPHR

SEQ ID NO: 7581 - protein, 11 aa, Artificial
  IGFBP-2 heparin binding domain-containing peptide sequence
RRKIGLNNPHR

SEQ ID NO: 7582 - protein, 11 aa, Artificial
  IGFBP-2 heparin binding domain-containing peptide sequence
HRKIGLNNPHR

SEQ ID NO: 7583 - protein, 11 aa, Artificial
  IGFBP-2 heparin binding domain-containing peptide sequence
KHRIGLNNPHR

SEQ ID NO: 7584 - protein, 11 aa, Artificial
  IGFBP-2 heparin binding domain-containing peptide sequence
RHRIGLNNPHR

SEQ ID NO: 7585 - protein, 11 aa, Artificial
  IGFBP-2 heparin binding domain-containing peptide sequence
HHRIGLNNPHR

SEQ ID NO: 7586 - protein, 11 aa, Artificial
  IGFBP-2 heparin binding domain-containing peptide sequence
KKRIGLNNPHR

SEQ ID NO: 7587 - protein, 11 aa, Artificial
  IGFBP-2 heparin binding domain-containing peptide sequence
RKRIGLNNPHR

SEQ ID NO: 7588 - protein, 11 aa, Artificial
  IGFBP-2 heparin binding domain-containing peptide sequence
HKRIGLNNPHR

SEQ ID NO: 7589 - protein, 11 aa, Artificial
  IGFBP-2 heparin binding domain-containing peptide sequence
KRRIGLNNPHR

SEQ ID NO: 7590 - protein, 11 aa, Artificial
  IGFBP-2 heparin binding domain-containing peptide sequence
RRRIGLNNPHR

SEQ ID NO: 7591 - protein, 11 aa, Artificial
  IGFBP-2 heparin binding domain-containing peptide sequence
HRRIGLNNPHR

SEQ ID NO: 7592 - protein, 11 aa, Artificial
  IGFBP-2 heparin binding domain-containing peptide sequence
KHHVGLNNPHR

SEQ ID NO: 7593 - protein, 11 aa, Artificial
  IGFBP-2 heparin binding domain-containing peptide sequence
RHHVGLNNPHR

SEQ ID NO: 7594 - protein, 11 aa, Artificial
  IGFBP-2 heparin binding domain-containing peptide sequence
HHHVGLNNPHR

SEQ ID NO: 7595 - protein, 11 aa, Artificial
  IGFBP-2 heparin binding domain-containing peptide sequence
KKHVGLNNPHR

SEQ ID NO: 7596 - protein, 11 aa, Artificial
  IGFBP-2 heparin binding domain-containing peptide sequence
RKHVGLNNPHR

SEQ ID NO: 7597 - protein, 11 aa, Artificial
  IGFBP-2 heparin binding domain-containing peptide sequence
HKHVGLNNPHR

SEQ ID NO: 7598 - protein, 11 aa, Artificial
  IGFBP-2 heparin binding domain-containing peptide sequence
KRHVGLNNPHR

SEQ ID NO: 7599 - protein, 11 aa, Artificial
  IGFBP-2 heparin binding domain-containing peptide sequence
RRHVGLNNPHR

SEQ ID NO: 7600 - protein, 11 aa, Artificial
  IGFBP-2 heparin binding domain-containing peptide sequence
HRHVGLNNPHR

SEQ ID NO: 7601 - protein, 11 aa, Artificial
  IGFBP-2 heparin binding domain-containing peptide sequence
KHKVGLNNPHR

SEQ ID NO: 7602 - protein, 11 aa, Artificial
  IGFBP-2 heparin binding domain-containing peptide sequence
RHKVGLNNPHR

SEQ ID NO: 7603 - protein, 11 aa, Artificial
  IGFBP-2 heparin binding domain-containing peptide sequence
HHKVGLNNPHR

SEQ ID NO: 7604 - protein, 11 aa, Artificial
  IGFBP-2 heparin binding domain-containing peptide sequence
KKKVGLNNPHR

SEQ ID NO: 7605 - protein, 11 aa, Artificial
  IGFBP-2 heparin binding domain-containing peptide sequence
RKKVGLNNPHR

SEQ ID NO: 7606 - protein, 11 aa, Artificial
  IGFBP-2 heparin binding domain-containing peptide sequence
HKKVGLNNPHR

SEQ ID NO: 7607 - protein, 11 aa, Artificial
  IGFBP-2 heparin binding domain-containing peptide sequence
KRKVGLNNPHR

SEQ ID NO: 7608 - protein, 11 aa, Artificial
  IGFBP-2 heparin binding domain-containing peptide sequence
RRKVGLNNPHR

SEQ ID NO: 7609 - protein, 11 aa, Artificial
  IGFBP-2 heparin binding domain-containing peptide sequence
HRKVGLNNPHR

SEQ ID NO: 7610 - protein, 11 aa, Artificial
  IGFBP-2 heparin binding domain-containing peptide sequence
KHRVGLNNPHR

SEQ ID NO: 7611 - protein, 11 aa, Artificial
  IGFBP-2 heparin binding domain-containing peptide sequence
RHRVGLNNPHR

SEQ ID NO: 7612 - protein, 11 aa, Artificial
  IGFBP-2 heparin binding domain-containing peptide sequence
HHRVGLNNPHR

SEQ ID NO: 7613 - protein, 11 aa, Artificial
  IGFBP-2 heparin binding domain-containing peptide sequence
KKRVGLNNPHR

SEQ ID NO: 7614 - protein, 11 aa, Artificial
  IGFBP-2 heparin binding domain-containing peptide sequence
RKRVGLNNPHR

SEQ ID NO: 7615 - protein, 11 aa, Artificial
  IGFBP-2 heparin binding domain-containing peptide sequence
HKRVGLNNPHR

SEQ ID NO: 7616 - protein, 11 aa, Artificial
  IGFBP-2 heparin binding domain-containing peptide sequence
KRRVGLNNPHR

SEQ ID NO: 7617 - protein, 11 aa, Artificial
  IGFBP-2 heparin binding domain-containing peptide sequence
RRRVGLNNPHR

SEQ ID NO: 7618 - protein, 11 aa, Artificial
  IGFBP-2 heparin binding domain-containing peptide sequence
HRRVGLNNPHR

SEQ ID NO: 7619 - protein, 11 aa, Artificial
  IGFBP-2 heparin binding domain-containing peptide sequence
KHHLGINNPHR

SEQ ID NO: 7620 - protein, 11 aa, Artificial
  IGFBP-2 heparin binding domain-containing peptide sequence
RHHLGINNPHR

SEQ ID NO: 7621 - protein, 11 aa, Artificial
  IGFBP-2 heparin binding domain-containing peptide sequence
HHHLGINNPHR

SEQ ID NO: 7622 - protein, 11 aa, Artificial
  IGFBP-2 heparin binding domain-containing peptide sequence
KKHLGINNPHR

SEQ ID NO: 7623 - protein, 11 aa, Artificial
  IGFBP-2 heparin binding domain-containing peptide sequence
RKHLGINNPHR

SEQ ID NO: 7624 - protein, 11 aa, Artificial
  IGFBP-2 heparin binding domain-containing peptide sequence
HKHLGINNPHR

SEQ ID NO: 7625 - protein, 11 aa, Artificial
  IGFBP-2 heparin binding domain-containing peptide sequence
KRHLGINNPHR

SEQ ID NO: 7626 - protein, 11 aa, Artificial
  IGFBP-2 heparin binding domain-containing peptide sequence
RRHLGINNPHR

SEQ ID NO: 7627 - protein, 11 aa, Artificial
  IGFBP-2 heparin binding domain-containing peptide sequence
HRHLGINNPHR

SEQ ID NO: 7628 - protein, 11 aa, Artificial
  IGFBP-2 heparin binding domain-containing peptide sequence
KHKLGINNPHR

SEQ ID NO: 7629 - protein, 11 aa, Artificial
  IGFBP-2 heparin binding domain-containing peptide sequence
RHKLGINNPHR

SEQ ID NO: 7630 - protein, 11 aa, Artificial
  IGFBP-2 heparin binding domain-containing peptide sequence
HHKLGINNPHR

SEQ ID NO: 7631 - protein, 11 aa, Artificial
  IGFBP-2 heparin binding domain-containing peptide sequence
KKKLGINNPHR

SEQ ID NO: 7632 - protein, 11 aa, Artificial
  IGFBP-2 heparin binding domain-containing peptide sequence
RKKLGINNPHR

SEQ ID NO: 7633 - protein, 11 aa, Artificial
  IGFBP-2 heparin binding domain-containing peptide sequence
HKKLGINNPHR

SEQ ID NO: 7634 - protein, 11 aa, Artificial
  IGFBP-2 heparin binding domain-containing peptide sequence
KRKLGINNPHR

SEQ ID NO: 7635 - protein, 11 aa, Artificial
  IGFBP-2 heparin binding domain-containing peptide sequence
RRKLGINNPHR

SEQ ID NO: 7636 - protein, 11 aa, Artificial
  IGFBP-2 heparin binding domain-containing peptide sequence
HRKLGINNPHR

SEQ ID NO: 7637 - protein, 11 aa, Artificial
  IGFBP-2 heparin binding domain-containing peptide sequence
KHRLGINNPHR

SEQ ID NO: 7638 - protein, 11 aa, Artificial
  IGFBP-2 heparin binding domain-containing peptide sequence
RHRLGINNPHR

SEQ ID NO: 7639 - protein, 11 aa, Artificial
  IGFBP-2 heparin binding domain-containing peptide sequence
HHRLGINNPHR

SEQ ID NO: 7640 - protein, 11 aa, Artificial
  IGFBP-2 heparin binding domain-containing peptide sequence
KKRLGINNPHR

SEQ ID NO: 7641 - protein, 11 aa, Artificial
  IGFBP-2 heparin binding domain-containing peptide sequence
RKRLGINNPHR

SEQ ID NO: 7642 - protein, 11 aa, Artificial
  IGFBP-2 heparin binding domain-containing peptide sequence
HKRLGINNPHR

SEQ ID NO: 7643 - protein, 11 aa, Artificial
  IGFBP-2 heparin binding domain-containing peptide sequence
KRRLGINNPHR

SEQ ID NO: 7644 - protein, 11 aa, Artificial
  IGFBP-2 heparin binding domain-containing peptide sequence
RRRLGINNPHR

SEQ ID NO: 7645 - protein, 11 aa, Artificial
  IGFBP-2 heparin binding domain-containing peptide sequence
HRRLGINNPHR

SEQ ID NO: 7646 - protein, 11 aa, Artificial
  IGFBP-2 heparin binding domain-containing peptide sequence
KHHIGIENPHR

SEQ ID NO: 7647 - protein, 11 aa, Artificial
  IGFBP-2 heparin binding domain-containing peptide sequence
RHHIGINNPHR

SEQ ID NO: 7648 - protein, 11 aa, Artificial
  IGFBP-2 heparin binding domain-containing peptide sequence
HHHIGINNPHR

SEQ ID NO: 7649 - protein, 11 aa, Artificial
  IGFBP-2 heparin binding domain-containing peptide sequence
KKHIGINNPHR

SEQ ID NO: 7650 - protein, 11 aa, Artificial
  IGFBP-2 heparin binding domain-containing peptide sequence
RKHIGINNPHR

SEQ ID NO: 7651 - protein, 11 aa, Artificial
  IGFBP-2 heparin binding domain-containing peptide sequence
HKHIGINNPHR

SEQ ID NO: 7652 - protein, 11 aa, Artificial
  IGFBP-2 heparin binding domain-containing peptide sequence
KRHIGINNPHR

SEQ ID NO: 7653 - protein, 11 aa, Artificial
  IGFBP-2 heparin binding domain-containing peptide sequence
RRHIGINNPHR

SEQ ID NO: 7654 - protein, 11 aa, Artificial
  IGFBP-2 heparin binding domain-containing peptide sequence
HRHIGINNPHR

SEQ ID NO: 7655 - protein, 11 aa, Artificial
  IGFBP-2 heparin binding domain-containing peptide sequence
KHKIGINNPHR

SEQ ID NO: 7656 - protein, 11 aa, Artificial
  IGFBP-2 heparin binding domain-containing peptide sequence
RHKIGINNPHR

SEQ ID NO: 7657 - protein, 11 aa, Artificial
  IGFBP-2 heparin binding domain-containing peptide sequence
HHKIGINNPHR

SEQ ID NO: 7658 - protein, 11 aa, Artificial
  IGFBP-2 heparin binding domain-containing peptide sequence
KKKIGINNPHR

SEQ ID NO: 7659 - protein, 11 aa, Artificial
  IGFBP-2 heparin binding domain-containing peptide sequence
RKKIGINNPHR

SEQ ID NO: 7660 - protein, 11 aa, Artificial
  IGFBP-2 heparin binding domain-containing peptide sequence
HKKIGINNPHR

SEQ ID NO: 7661 - protein, 11 aa, Artificial
  IGFBP-2 heparin binding domain-containing peptide sequence
KRKIGINNPHR

SEQ ID NO: 7662 - protein, 11 aa, Artificial
  IGFBP-2 heparin binding domain-containing peptide sequence
RRKIGINNPHR

SEQ ID NO: 7663 - protein, 11 aa, Artificial
  IGFBP-2 heparin binding domain-containing peptide sequence
HRKIGINNPHR

SEQ ID NO: 7664 - protein, 11 aa, Artificial
  IGFBP-2 heparin binding domain-containing peptide sequence
KHRIGINNPHR

SEQ ID NO: 7665 - protein, 11 aa, Artificial
  IGFBP-2 heparin binding domain-containing peptide sequence
RHRIGINNPHR

SEQ ID NO: 7666 - protein, 11 aa, Artificial
  IGFBP-2 heparin binding domain-containing peptide sequence
HHRIGINNPHR

SEQ ID NO: 7667 - protein, 11 aa, Artificial
  IGFBP-2 heparin binding domain-containing peptide sequence
KKRIGINNPHR

SEQ ID NO: 7668 - protein, 11 aa, Artificial
  IGFBP-2 heparin binding domain-containing peptide sequence
RKRIGINNPHR

SEQ ID NO: 7669 - protein, 11 aa, Artificial
  IGFBP-2 heparin binding domain-containing peptide sequence
HKRIGINNPHR

SEQ ID NO: 7670 - protein, 11 aa, Artificial
  IGFBP-2 heparin binding domain-containing peptide sequence
KRRIGINNPHR

SEQ ID NO: 7671 - protein, 11 aa, Artificial
  IGFBP-2 heparin binding domain-containing peptide sequence
RRRIGINNPHR

SEQ ID NO: 7672 - protein, 11 aa, Artificial
  IGFBP-2 heparin binding domain-containing peptide sequence
HRRIGINNPHR

SEQ ID NO: 7673 - protein, 11 aa, Artificial
  IGFBP-2 heparin binding domain-containing peptide sequence
KHHVGINNPHR

SEQ ID NO: 7674 - protein, 11 aa, Artificial
  IGFBP-2 heparin binding domain-containing peptide sequence
RHHVGINNPHR

SEQ ID NO: 7675 - protein, 11 aa, Artificial
  IGFBP-2 heparin binding domain-containing peptide sequence
HHHVGINNPHR

SEQ ID NO: 7676 - protein, 11 aa, Artificial
  IGFBP-2 heparin binding domain-containing peptide sequence
KKHVGINNPHR

SEQ ID NO: 7677 - protein, 11 aa, Artificial
  IGFBP-2 heparin binding domain-containing peptide sequence
RKHVGINNPHR

SEQ ID NO: 7678 - protein, 11 aa, Artificial
  IGFBP-2 heparin binding domain-containing peptide sequence
HKHVGINNPHR

SEQ ID NO: 7679 - protein, 11 aa, Artificial
  IGFBP-2 heparin binding domain-containing peptide sequence
KRHVGINNPHR

SEQ ID NO: 7680 - protein, 11 aa, Artificial
  IGFBP-2 heparin binding domain-containing peptide sequence
RRHVGINNPHR

SEQ ID NO: 7681 - protein, 11 aa, Artificial
  IGFBP-2 heparin binding domain-containing peptide sequence
HRHVGINNPHR

SEQ ID NO: 7682 - protein, 11 aa, Artificial
  IGFBP-2 heparin binding domain-containing peptide sequence
KHKVGINNPHR

SEQ ID NO: 7683 - protein, 11 aa, Artificial
  IGFBP-2 heparin binding domain-containing peptide sequence
RHKVGINNPHR

SEQ ID NO: 7684 - protein, 11 aa, Artificial
  IGFBP-2 heparin binding domain-containing peptide sequence
HHKVGINNPHR

SEQ ID NO: 7685 - protein, 11 aa, Artificial
  IGFBP-2 heparin binding domain-containing peptide sequence
KKKVGINNPHR

SEQ ID NO: 7686 - protein, 11 aa, Artificial
  IGFBP-2 heparin binding domain-containing peptide sequence
RKKVGINNPHR

SEQ ID NO: 7687 - protein, 11 aa, Artificial
  IGFBP-2 heparin binding domain-containing peptide sequence
HKKVGINNPHR

SEQ ID NO: 7688 - protein, 11 aa, Artificial
  IGFBP-2 heparin binding domain-containing peptide sequence
KRKVGINNPHR

SEQ ID NO: 7689 - protein, 11 aa, Artificial
  IGFBP-2 heparin binding domain-containing peptide sequence
RRKVGINNPHR

SEQ ID NO: 7690 - protein, 11 aa, Artificial
  IGFBP-2 heparin binding domain-containing peptide sequence
HRKVGINNPHR

SEQ ID NO: 7691 - protein, 11 aa, Artificial
  IGFBP-2 heparin binding domain-containing peptide sequence
KHRVGINNPHR

SEQ ID NO: 7692 - protein, 11 aa, Artificial
  IGFBP-2 heparin binding domain-containing peptide sequence
RHRVGINNPHR

SEQ ID NO: 7693 - protein, 11 aa, Artificial
  IGFBP-2 heparin binding domain-containing peptide sequence
HHRVGINNPHR

SEQ ID NO: 7694 - protein, 11 aa, Artificial
  IGFBP-2 heparin binding domain-containing peptide sequence
KKRVGINNPHR

SEQ ID NO: 7695 - protein, 11 aa, Artificial
  IGFBP-2 heparin binding domain-containing peptide sequence
RKRVGINNPHR

SEQ ID NO: 7696 - protein, 11 aa, Artificial
  IGFBP-2 heparin binding domain-containing peptide sequence
HKRVGINNPHR

SEQ ID NO: 7697 - protein, 11 aa, Artificial
  IGFBP-2 heparin binding domain-containing peptide sequence
KRRVGINNPHR

SEQ ID NO: 7698 - protein, 11 aa, Artificial
  IGFBP-2 heparin binding domain-containing peptide sequence
RRRVGINNPHR

SEQ ID NO: 7699 - protein, 11 aa, Artificial
  IGFBP-2 heparin binding domain-containing peptide sequence
HRRVGINNPHR

SEQ ID NO: 7700 - protein, 11 aa, Artificial
  IGFBP-2 heparin binding domain-containing peptide sequence
KHHLGVNNPHR

SEQ ID NO: 7701 - protein, 11 aa, Artificial
  IGFBP-2 heparin binding domain-containing peptide sequence
RHHLGVNNPHR

SEQ ID NO: 7702 - protein, 11 aa, Artificial
  IGFBP-2 heparin binding domain-containing peptide sequence
HHHLGVNNPHR

SEQ ID NO: 7703 - protein, 11 aa, Artificial
  IGFBP-2 heparin binding domain-containing peptide sequence
KKHLGVNNPHR

SEQ ID NO: 7704 - protein, 11 aa, Artificial
  IGFBP-2 heparin binding domain-containing peptide sequence
RKHLGVNNPHR

SEQ ID NO: 7705 - protein, 11 aa, Artificial
  IGFBP-2 heparin binding domain-containing peptide sequence
HKHLGVNNPHR

SEQ ID NO: 7706 - protein, 11 aa, Artificial
  IGFBP-2 heparin binding domain-containing peptide sequence
KRHLGVNNPHR

SEQ ID NO: 7707 - protein, 11 aa, Artificial
  IGFBP-2 heparin binding domain-containing peptide sequence
RRHLGVNNPHR

SEQ ID NO: 7708 - protein, 11 aa, Artificial
  IGFBP-2 heparin binding domain-containing peptide sequence
HRHLGVNNPHR

SEQ ID NO: 7709 - protein, 11 aa, Artificial
  IGFBP-2 heparin binding domain-containing peptide sequence
KHKLGVNNPHR

SEQ ID NO: 7710 - protein, 11 aa, Artificial
  IGFBP-2 heparin binding domain-containing peptide sequence
RHKLGVNNPHR

SEQ ID NO: 7711 - protein, 11 aa, Artificial
  IGFBP-2 heparin binding domain-containing peptide sequence
HHKLGVNNPHR

SEQ ID NO: 7712 - protein, 11 aa, Artificial
  IGFBP-2 heparin binding domain-containing peptide sequence
KKKLGVNNPHR

SEQ ID NO: 7713 - protein, 11 aa, Artificial
  IGFBP-2 heparin binding domain-containing peptide sequence
RKKLGVNNPHR

SEQ ID NO: 7714 - protein, 11 aa, Artificial
  IGFBP-2 heparin binding domain-containing peptide sequence
HKKLGVNNPHR

SEQ ID NO: 7715 - protein, 11 aa, Artificial
  IGFBP-2 heparin binding domain-containing peptide sequence
KRKLGVNNPHR

SEQ ID NO: 7716 - protein, 11 aa, Artificial
  IGFBP-2 heparin binding domain-containing peptide sequence
RRKLGVNNPHR

SEQ ID NO: 7717 - protein, 11 aa, Artificial
  IGFBP-2 heparin binding domain-containing peptide sequence
HRKLGVNNPHR

SEQ ID NO: 7718 - protein, 11 aa, Artificial
  IGFBP-2 heparin binding domain-containing peptide sequence
KHRLGVNNPHR

SEQ ID NO: 7719 - protein, 11 aa, Artificial
  IGFBP-2 heparin binding domain-containing peptide sequence
RHRLGVNNPHR

SEQ ID NO: 7720 - protein, 11 aa, Artificial
  IGFBP-2 heparin binding domain-containing peptide sequence
HHRLGVNNPHR

SEQ ID NO: 7721 - protein, 11 aa, Artificial
  IGFBP-2 heparin binding domain-containing peptide sequence
KKRLGVNNPHR

SEQ ID NO: 7722 - protein, 11 aa, Artificial
  IGFBP-2 heparin binding domain-containing peptide sequence
RKRLGVNNPHR

SEQ ID NO: 7723 - protein, 11 aa, Artificial
  IGFBP-2 heparin binding domain-containing peptide sequence
HKRLGVNNPHR

SEQ ID NO: 7724 - protein, 11 aa, Artificial
  IGFBP-2 heparin binding domain-containing peptide sequence
KRRLGVNNPHR

SEQ ID NO: 7725 - protein, 11 aa, Artificial
  IGFBP-2 heparin binding domain-containing peptide sequence
RRRLGVNNPHR

SEQ ID NO: 7726 - protein, 11 aa, Artificial
  IGFBP-2 heparin binding domain-containing peptide sequence
HRRLGVNNPHR

SEQ ID NO: 7727 - protein, 11 aa, Artificial
  IGFBP-2 heparin binding domain-containing peptide sequence
KHHIGVNNPHR

SEQ ID NO: 7728 - protein, 11 aa, Artificial
  IGFBP-2 heparin binding domain-containing peptide sequence
RHHIGVNNPHR

SEQ ID NO: 7729 - protein, 11 aa, Artificial
  IGFBP-2 heparin binding domain-containing peptide sequence
HHHIGVNNPHR

SEQ ID NO: 7730 - protein, 11 aa, Artificial
  IGFBP-2 heparin binding domain-containing peptide sequence
KKHIGVNNPHR

SEQ ID NO: 7731 - protein, 11 aa, Artificial
  IGFBP-2 heparin binding domain-containing peptide sequence
RKHIGVNNPHR

SEQ ID NO: 7732 - protein, 11 aa, Artificial
  IGFBP-2 heparin binding domain-containing peptide sequence
HKHIGVNNPHR

SEQ ID NO: 7733 - protein, 11 aa, Artificial
  IGFBP-2 heparin binding domain-containing peptide sequence
KRHIGVNNPHR

SEQ ID NO: 7734 - protein, 11 aa, Artificial
  IGFBP-2 heparin binding domain-containing peptide sequence
RRHIGVNNPHR

SEQ ID NO: 7735 - protein, 11 aa, Artificial
  IGFBP-2 heparin binding domain-containing peptide sequence
HRHIGVNNPHR

SEQ ID NO: 7736 - protein, 11 aa, Artificial
  IGFBP-2 heparin binding domain-containing peptide sequence
KHKIGVNNPHR

SEQ ID NO: 7737 - protein, 11 aa, Artificial
  IGFBP-2 heparin binding domain-containing peptide sequence
RHKIGVNNPHR

SEQ ID NO: 7738 - protein, 11 aa, Artificial
  IGFBP-2 heparin binding domain-containing peptide sequence
HHKIGVNNPHR

SEQ ID NO: 7739 - protein, 11 aa, Artificial
  IGFBP-2 heparin binding domain-containing peptide sequence
KKKIGVNNPHR

SEQ ID NO: 7740 - protein, 11 aa, Artificial
  IGFBP-2 heparin binding domain-containing peptide sequence
RKKIGVNNPHR

SEQ ID NO: 7741 - protein, 11 aa, Artificial
  IGFBP-2 heparin binding domain-containing peptide sequence
HKKIGVNNPHR

SEQ ID NO: 7742 - protein, 11 aa, Artificial
  IGFBP-2 heparin binding domain-containing peptide sequence
KRKIGVNNPHR

SEQ ID NO: 7743 - protein, 11 aa, Artificial
  IGFBP-2 heparin binding domain-containing peptide sequence
RRKIGVNNPHR

SEQ ID NO: 7744 - protein, 11 aa, Artificial
  IGFBP-2 heparin binding domain-containing peptide sequence
HRKIGVNNPHR

SEQ ID NO: 7745 - protein, 11 aa, Artificial
  IGFBP-2 heparin binding domain-containing peptide sequence
KHRIGVNNPHR

SEQ ID NO: 7746 - protein, 11 aa, Artificial
  IGFBP-2 heparin binding domain-containing peptide sequence
RHRIGVNNPHR

SEQ ID NO: 7747 - protein, 11 aa, Artificial
  IGFBP-2 heparin binding domain-containing peptide sequence
HHRIGVNNPHR

SEQ ID NO: 7748 - protein, 11 aa, Artificial
  IGFBP-2 heparin binding domain-containing peptide sequence
KKRIGVNNPHR

SEQ ID NO: 7749 - protein, 11 aa, Artificial
  IGFBP-2 heparin binding domain-containing peptide sequence
RKRIGVNNPHR

SEQ ID NO: 7750 - protein, 11 aa, Artificial
  IGFBP-2 heparin binding domain-containing peptide sequence
HKRIGVNNPHR

SEQ ID NO: 7751 - protein, 11 aa, Artificial
  IGFBP-2 heparin binding domain-containing peptide sequence
KRRIGVNNPHR

SEQ ID NO: 7752 - protein, 11 aa, Artificial
  IGFBP-2 heparin binding domain-containing peptide sequence
RRRIGVNNPHR

SEQ ID NO: 7753 - protein, 11 aa, Artificial
  IGFBP-2 heparin binding domain-containing peptide sequence
HRRIGVNNPHR

SEQ ID NO: 7754 - protein, 11 aa, Artificial
  IGFBP-2 heparin binding domain-containing peptide sequence
KHHVGVNNPHR

SEQ ID NO: 7755 - protein, 11 aa, Artificial
  IGFBP-2 heparin binding domain-containing peptide sequence
RHHVGVNNPHR

SEQ ID NO: 7756 - protein, 11 aa, Artificial
  IGFBP-2 heparin binding domain-containing peptide sequence
HHHVGVNNPHR

SEQ ID NO: 7757 - protein, 11 aa, Artificial
  IGFBP-2 heparin binding domain-containing peptide sequence
KKHVGVNNPHR

SEQ ID NO: 7758 - protein, 11 aa, Artificial
  IGFBP-2 heparin binding domain-containing peptide sequence
RKHVGVNNPHR

SEQ ID NO: 7759 - protein, 11 aa, Artificial
  IGFBP-2 heparin binding domain-containing peptide sequence
HKHVGVNNPHR

SEQ ID NO: 7760 - protein, 11 aa, Artificial
  IGFBP-2 heparin binding domain-containing peptide sequence
KRHVGVNNPHR

SEQ ID NO: 7761 - protein, 11 aa, Artificial
  IGFBP-2 heparin binding domain-containing peptide sequence
RRHVGVNNPHR

SEQ ID NO: 7762 - protein, 11 aa, Artificial
  IGFBP-2 heparin binding domain-containing peptide sequence
HRHVGVNNPHR

SEQ ID NO: 7763 - protein, 11 aa, Artificial
  IGFBP-2 heparin binding domain-containing peptide sequence
KHKVGVNNPHR

SEQ ID NO: 7764 - protein, 11 aa, Artificial
  IGFBP-2 heparin binding domain-containing peptide sequence
RHKVGVNNPHR

SEQ ID NO: 7765 - protein, 11 aa, Artificial
  IGFBP-2 heparin binding domain-containing peptide sequence
HHKVGVNNPHR

SEQ ID NO: 7766 - protein, 11 aa, Artificial
  IGFBP-2 heparin binding domain-containing peptide sequence
KKKVGVNNPHR

SEQ ID NO: 7767 - protein, 11 aa, Artificial
  IGFBP-2 heparin binding domain-containing peptide sequence
RKKVGVNNPHR

SEQ ID NO: 7768 - protein, 11 aa, Artificial
  IGFBP-2 heparin binding domain-containing peptide sequence
HKKVGVNNPHR

SEQ ID NO: 7769 - protein, 11 aa, Artificial
  IGFBP-2 heparin binding domain-containing peptide sequence
KRKVGVNNPHR

SEQ ID NO: 7770 - protein, 11 aa, Artificial
  IGFBP-2 heparin binding domain-containing peptide sequence
RRKVGVNNPHR

SEQ ID NO: 7771 - protein, 11 aa, Artificial
  IGFBP-2 heparin binding domain-containing peptide sequence
HRKVGVNNPHR

SEQ ID NO: 7772 - protein, 11 aa, Artificial
  IGFBP-2 heparin binding domain-containing peptide sequence
KHRVGVNNPHR

SEQ ID NO: 7773 - protein, 11 aa, Artificial
  IGFBP-2 heparin binding domain-containing peptide sequence
RHRVGVNNPHR

SEQ ID NO: 7774 - protein, 11 aa, Artificial
  IGFBP-2 heparin binding domain-containing peptide sequence
HHRVGVNNPHR

SEQ ID NO: 7775 - protein, 11 aa, Artificial
  IGFBP-2 heparin binding domain-containing peptide sequence
KKRVGVNNPHR

SEQ ID NO: 7776 - protein, 11 aa, Artificial
  IGFBP-2 heparin binding domain-containing peptide sequence
RKRVGVNNPHR

SEQ ID NO: 7777 - protein, 11 aa, Artificial
  IGFBP-2 heparin binding domain-containing peptide sequence
HKRVGVNNPHR

SEQ ID NO: 7778 - protein, 11 aa, Artificial
  IGFBP-2 heparin binding domain-containing peptide sequence
KRRVGVNNPHR

SEQ ID NO: 7779 - protein, 11 aa, Artificial
  IGFBP-2 heparin binding domain-containing peptide sequence
RRRVGVNNPHR

SEQ ID NO: 7780 - protein, 11 aa, Artificial
  IGFBP-2 heparin binding domain-containing peptide sequence
HRRVGVNNPHR

SEQ ID NO: 7781 - protein, 11 aa, Artificial
  IGFBP-2 heparin binding domain-containing peptide sequence
KHHLGLEEPHH

SEQ ID NO: 7782 - protein, 11 aa, Artificial
  IGFBP-2 heparin binding domain-containing peptide sequence
RHHLGLEEPHH

SEQ ID NO: 7783 - protein, 11 aa, Artificial
  IGFBP-2 heparin binding domain-containing peptide sequence
HHHLGLEEPHH

SEQ ID NO: 7784 - protein, 11 aa, Artificial
  IGFBP-2 heparin binding domain-containing peptide sequence
KKHLGLEEPHH

SEQ ID NO: 7785 - protein, 11 aa, Artificial
  IGFBP-2 heparin binding domain-containing peptide sequence
RKHLGLEEPHH

SEQ ID NO: 7786 - protein, 11 aa, Artificial
  IGFBP-2 heparin binding domain-containing peptide sequence
HKHLGLEEPHH

SEQ ID NO: 7787 - protein, 11 aa, Artificial
  IGFBP-2 heparin binding domain-containing peptide sequence
KRHLGLEEPHH

SEQ ID NO: 7788 - protein, 11 aa, Artificial
  IGFBP-2 heparin binding domain-containing peptide sequence
RRHLGLEEPHH

SEQ ID NO: 7789 - protein, 11 aa, Artificial
  IGFBP-2 heparin binding domain-containing peptide sequence
HRHLGLEEPHH

SEQ ID NO: 7790 - protein, 11 aa, Artificial
  IGFBP-2 heparin binding domain-containing peptide sequence
KHKLGLEEPHH

SEQ ID NO: 7791 - protein, 11 aa, Artificial
  IGFBP-2 heparin binding domain-containing peptide sequence
RHKLGLEEPHH

SEQ ID NO: 7792 - protein, 11 aa, Artificial
  IGFBP-2 heparin binding domain-containing peptide sequence
HHKLGLEEPHH

SEQ ID NO: 7793 - protein, 11 aa, Artificial
  IGFBP-2 heparin binding domain-containing peptide sequence
KKKLGLEEPHH

SEQ ID NO: 7794 - protein, 11 aa, Artificial
  IGFBP-2 heparin binding domain-containing peptide sequence
RKKLGLEEPHH

SEQ ID NO: 7795 - protein, 11 aa, Artificial
  IGFBP-2 heparin binding domain-containing peptide sequence
HKKLGLEEPHH

SEQ ID NO: 7796 - protein, 11 aa, Artificial
  IGFBP-2 heparin binding domain-containing peptide sequence
KRKLGLEEPHH

SEQ ID NO: 7797 - protein, 11 aa, Artificial
  IGFBP-2 heparin binding domain-containing peptide sequence
RRKLGLEEPHH

SEQ ID NO: 7798 - protein, 11 aa, Artificial
  IGFBP-2 heparin binding domain-containing peptide sequence
HRKLGLEEPHH

SEQ ID NO: 7799 - protein, 11 aa, Artificial
  IGFBP-2 heparin binding domain-containing peptide sequence
KHRLGLEEPHH

SEQ ID NO: 7800 - protein, 11 aa, Artificial
  IGFBP-2 heparin binding domain-containing peptide sequence
RHRLGLEEPHH

SEQ ID NO: 7801 - protein, 11 aa, Artificial
  IGFBP-2 heparin binding domain-containing peptide sequence
HHRLGLEEPHH

SEQ ID NO: 7802 - protein, 11 aa, Artificial
  IGFBP-2 heparin binding domain-containing peptide sequence
KKRLGLEEPHH

SEQ ID NO: 7803 - protein, 11 aa, Artificial
  IGFBP-2 heparin binding domain-containing peptide sequence
RKRLGLEEPHH

SEQ ID NO: 7804 - protein, 11 aa, Artificial
  IGFBP-2 heparin binding domain-containing peptide sequence
HKRLGLEEPHH

SEQ ID NO: 7805 - protein, 11 aa, Artificial
  IGFBP-2 heparin binding domain-containing peptide sequence
KRRLGLEEPHH

SEQ ID NO: 7806 - protein, 11 aa, Artificial
  IGFBP-2 heparin binding domain-containing peptide sequence
RRRLGLEEPHH

SEQ ID NO: 7807 - protein, 11 aa, Artificial
  IGFBP-2 heparin binding domain-containing peptide sequence
HRRLGLEEPHH

SEQ ID NO: 7808 - protein, 11 aa, Artificial
  IGFBP-2 heparin binding domain-containing peptide sequence
KHHIGLEEPHH

SEQ ID NO: 7809 - protein, 11 aa, Artificial
  IGFBP-2 heparin binding domain-containing peptide sequence
RHHIGLEEPHH

SEQ ID NO: 7810 - protein, 11 aa, Artificial
  IGFBP-2 heparin binding domain-containing peptide sequence
HHHIGLEEPHH

SEQ ID NO: 7811 - protein, 11 aa, Artificial
  IGFBP-2 heparin binding domain-containing peptide sequence
KKHIGLEEPHH

SEQ ID NO: 7812 - protein, 11 aa, Artificial
  IGFBP-2 heparin binding domain-containing peptide sequence
RKHIGLEEPHH

SEQ ID NO: 7813 - protein, 11 aa, Artificial
  IGFBP-2 heparin binding domain-containing peptide sequence
HKHIGLEEPHH

SEQ ID NO: 7814 - protein, 11 aa, Artificial
  IGFBP-2 heparin binding domain-containing peptide sequence
KRHIGLEEPHH

SEQ ID NO: 7815 - protein, 11 aa, Artificial
  IGFBP-2 heparin binding domain-containing peptide sequence
RRHIGLEEPHH

SEQ ID NO: 7816 - protein, 11 aa, Artificial
  IGFBP-2 heparin binding domain-containing peptide sequence
HRHIGLEEPHH

SEQ ID NO: 7817 - protein, 11 aa, Artificial
  IGFBP-2 heparin binding domain-containing peptide sequence
KHKIGLEEPHH

SEQ ID NO: 7818 - protein, 11 aa, Artificial
  IGFBP-2 heparin binding domain-containing peptide sequence
RHKIGLEEPHH

SEQ ID NO: 7819 - protein, 11 aa, Artificial
  IGFBP-2 heparin binding domain-containing peptide sequence
HHKIGLEEPHH

SEQ ID NO: 7820 - protein, 11 aa, Artificial
  IGFBP-2 heparin binding domain-containing peptide sequence
KKKIGLEEPHH

SEQ ID NO: 7821 - protein, 11 aa, Artificial
  IGFBP-2 heparin binding domain-containing peptide sequence
RKKIGLEEPHH

SEQ ID NO: 7822 - protein, 11 aa, Artificial
  IGFBP-2 heparin binding domain-containing peptide sequence
HKKIGLEEPHH

SEQ ID NO: 7823 - protein, 11 aa, Artificial
  IGFBP-2 heparin binding domain-containing peptide sequence
KRKIGLEEPHH

SEQ ID NO: 7824 - protein, 11 aa, Artificial
  IGFBP-2 heparin binding domain-containing peptide sequence
RRKIGLEEPHH

SEQ ID NO: 7825 - protein, 11 aa, Artificial
  IGFBP-2 heparin binding domain-containing peptide sequence
HRKIGLEEPHH

SEQ ID NO: 7826 - protein, 11 aa, Artificial
  IGFBP-2 heparin binding domain-containing peptide sequence
KHRIGLEEPHH

SEQ ID NO: 7827 - protein, 11 aa, Artificial
  IGFBP-2 heparin binding domain-containing peptide sequence
RHRIGLEEPHH

SEQ ID NO: 7828 - protein, 11 aa, Artificial
  IGFBP-2 heparin binding domain-containing peptide sequence
HHRIGLEEPHH

SEQ ID NO: 7829 - protein, 11 aa, Artificial
  IGFBP-2 heparin binding domain-containing peptide sequence
KKRIGLEEPHH

SEQ ID NO: 7830 - protein, 11 aa, Artificial
  IGFBP-2 heparin binding domain-containing peptide sequence
RKRIGLEEPHH

SEQ ID NO: 7831 - protein, 11 aa, Artificial
  IGFBP-2 heparin binding domain-containing peptide sequence
HKRIGLEEPHH

SEQ ID NO: 7832 - protein, 11 aa, Artificial
  IGFBP-2 heparin binding domain-containing peptide sequence
KRRIGLEEPHH

SEQ ID NO: 7833 - protein, 11 aa, Artificial
  IGFBP-2 heparin binding domain-containing peptide sequence
RRRIGLEEPHH

SEQ ID NO: 7834 - protein, 11 aa, Artificial
  IGFBP-2 heparin binding domain-containing peptide sequence
HRRIGLEEPHH

SEQ ID NO: 7835 - protein, 11 aa, Artificial
  IGFBP-2 heparin binding domain-containing peptide sequence
KHHVGLEEPHH

SEQ ID NO: 7836 - protein, 11 aa, Artificial
  IGFBP-2 heparin binding domain-containing peptide sequence
RHHVGLEEPHH

SEQ ID NO: 7837 - protein, 11 aa, Artificial
  IGFBP-2 heparin binding domain-containing peptide sequence
HHHVGLEEPHH

SEQ ID NO: 7838 - protein, 11 aa, Artificial
  IGFBP-2 heparin binding domain-containing peptide sequence
KKHVGLEEPHH

SEQ ID NO: 7839 - protein, 11 aa, Artificial
  IGFBP-2 heparin binding domain-containing peptide sequence
RKHVGLEEPHH

SEQ ID NO: 7840 - protein, 11 aa, Artificial
  IGFBP-2 heparin binding domain-containing peptide sequence
HKHVGLEEPHH

SEQ ID NO: 7841 - protein, 11 aa, Artificial
  IGFBP-2 heparin binding domain-containing peptide sequence
KRHVGLEEPHH

SEQ ID NO: 7842 - protein, 11 aa, Artificial
  IGFBP-2 heparin binding domain-containing peptide sequence
RRHVGLEEPHH

SEQ ID NO: 7843 - protein, 11 aa, Artificial
  IGFBP-2 heparin binding domain-containing peptide sequence
HRHVGLEEPHH

SEQ ID NO: 7844 - protein, 11 aa, Artificial
  IGFBP-2 heparin binding domain-containing peptide sequence
KHKVGLEEPHH

SEQ ID NO: 7845 - protein, 11 aa, Artificial
  IGFBP-2 heparin binding domain-containing peptide sequence
RHKVGLEEPHH

SEQ ID NO: 7846 - protein, 11 aa, Artificial
  IGFBP-2 heparin binding domain-containing peptide sequence
HHKVGLEEPHH

SEQ ID NO: 7847 - protein, 11 aa, Artificial
  IGFBP-2 heparin binding domain-containing peptide sequence
KKKVGLEEPHH

SEQ ID NO: 7848 - protein, 11 aa, Artificial
  IGFBP-2 heparin binding domain-containing peptide sequence
RKKVGLEEPHH

SEQ ID NO: 7849 - protein, 11 aa, Artificial
  IGFBP-2 heparin binding domain-containing peptide sequence
HKKVGLEEPHH

SEQ ID NO: 7850 - protein, 11 aa, Artificial
  IGFBP-2 heparin binding domain-containing peptide sequence
KRKVGLEEPHH

SEQ ID NO: 7851 - protein, 11 aa, Artificial
  IGFBP-2 heparin binding domain-containing peptide sequence
RRKVGLEEPHH

SEQ ID NO: 7852 - protein, 11 aa, Artificial
  IGFBP-2 heparin binding domain-containing peptide sequence
HRKVGLEEPHH

SEQ ID NO: 7853 - protein, 11 aa, Artificial
  IGFBP-2 heparin binding domain-containing peptide sequence
KHRVGLEEPHH

SEQ ID NO: 7854 - protein, 11 aa, Artificial
  IGFBP-2 heparin binding domain-containing peptide sequence
RHRVGLEEPHH

SEQ ID NO: 7855 - protein, 11 aa, Artificial
  IGFBP-2 heparin binding domain-containing peptide sequence
HHRVGLEEPHH

SEQ ID NO: 7856 - protein, 11 aa, Artificial
  IGFBP-2 heparin binding domain-containing peptide sequence
KKRVGLEEPHH

SEQ ID NO: 7857 - protein, 11 aa, Artificial
  IGFBP-2 heparin binding domain-containing peptide sequence
RKRVGLEEPHH

SEQ ID NO: 7858 - protein, 11 aa, Artificial
  IGFBP-2 heparin binding domain-containing peptide sequence
HKRVGLEEPHH

SEQ ID NO: 7859 - protein, 11 aa, Artificial
  IGFBP-2 heparin binding domain-containing peptide sequence
KRRVGLEEPHH

SEQ ID NO: 7860 - protein, 11 aa, Artificial
  IGFBP-2 heparin binding domain-containing peptide sequence
RRRVGLEEPHH

SEQ ID NO: 7861 - protein, 11 aa, Artificial
  IGFBP-2 heparin binding domain-containing peptide sequence
HRRVGLEEPHH

SEQ ID NO: 7862 - protein, 11 aa, Artificial
  IGFBP-2 heparin binding domain-containing peptide sequence
KHHLGIEEPHH

SEQ ID NO: 7863 - protein, 11 aa, Artificial
  IGFBP-2 heparin binding domain-containing peptide sequence
RHHLGIEEPHH

SEQ ID NO: 7864 - protein, 11 aa, Artificial
  IGFBP-2 heparin binding domain-containing peptide sequence
HHHLGIEEPHH

SEQ ID NO: 7865 - protein, 11 aa, Artificial
  IGFBP-2 heparin binding domain-containing peptide sequence
KKHLGIEEPHH

SEQ ID NO: 7866 - protein, 11 aa, Artificial
  IGFBP-2 heparin binding domain-containing peptide sequence
RKHLGIEEPHH

SEQ ID NO: 7867 - protein, 11 aa, Artificial
  IGFBP-2 heparin binding domain-containing peptide sequence
HKHLGIEEPHH

SEQ ID NO: 7868 - protein, 11 aa, Artificial
  IGFBP-2 heparin binding domain-containing peptide sequence
KRHLGIEEPHH

SEQ ID NO: 7869 - protein, 11 aa, Artificial
  IGFBP-2 heparin binding domain-containing peptide sequence
RRHLGIEEPHH

SEQ ID NO: 7870 - protein, 11 aa, Artificial
  IGFBP-2 heparin binding domain-containing peptide sequence
HRHLGIEEPHH

SEQ ID NO: 7871 - protein, 11 aa, Artificial
  IGFBP-2 heparin binding domain-containing peptide sequence
KHKLGIEEPHH

SEQ ID NO: 7872 - protein, 11 aa, Artificial
  IGFBP-2 heparin binding domain-containing peptide sequence
RHKLGIEEPHH

SEQ ID NO: 7873 - protein, 11 aa, Artificial
  IGFBP-2 heparin binding domain-containing peptide sequence
HHKLGIEEPHH

SEQ ID NO: 7874 - protein, 11 aa, Artificial
  IGFBP-2 heparin binding domain-containing peptide sequence
KKKLGIEEPHH

SEQ ID NO: 7875 - protein, 11 aa, Artificial
  IGFBP-2 heparin binding domain-containing peptide sequence
RKKLGIEEPHH

SEQ ID NO: 7876 - protein, 11 aa, Artificial
  IGFBP-2 heparin binding domain-containing peptide sequence
HKKLGIEEPHH

SEQ ID NO: 7877 - protein, 11 aa, Artificial
  IGFBP-2 heparin binding domain-containing peptide sequence
KRKLGIEEPHH

SEQ ID NO: 7878 - protein, 11 aa, Artificial
  IGFBP-2 heparin binding domain-containing peptide sequence
RRKLGIEEPHH

SEQ ID NO: 7879 - protein, 11 aa, Artificial
  IGFBP-2 heparin binding domain-containing peptide sequence
HRKLGIEEPHH

SEQ ID NO: 7880 - protein, 11 aa, Artificial
  IGFBP-2 heparin binding domain-containing peptide sequence
KHRLGIEEPHH

SEQ ID NO: 7881 - protein, 11 aa, Artificial
  IGFBP-2 heparin binding domain-containing peptide sequence
RHRLGIEEPHH

SEQ ID NO: 7882 - protein, 11 aa, Artificial
  IGFBP-2 heparin binding domain-containing peptide sequence
HHRLGIEEPHH

SEQ ID NO: 7883 - protein, 11 aa, Artificial
  IGFBP-2 heparin binding domain-containing peptide sequence
KKRLGIEEPHH

SEQ ID NO: 7884 - protein, 11 aa, Artificial
  IGFBP-2 heparin binding domain-containing peptide sequence
RKRLGIEEPHH

SEQ ID NO: 7885 - protein, 11 aa, Artificial
  IGFBP-2 heparin binding domain-containing peptide sequence
HKRLGIEEPHH

SEQ ID NO: 7886 - protein, 11 aa, Artificial
  IGFBP-2 heparin binding domain-containing peptide sequence
KRRLGIEEPHH

SEQ ID NO: 7887 - protein, 11 aa, Artificial
  IGFBP-2 heparin binding domain-containing peptide sequence
RRRLGIEEPHH

SEQ ID NO: 7888 - protein, 11 aa, Artificial
  IGFBP-2 heparin binding domain-containing peptide sequence
HRRLGIEEPHH

SEQ ID NO: 7889 - protein, 11 aa, Artificial
  IGFBP-2 heparin binding domain-containing peptide sequence
KHHIGIEEPHH

SEQ ID NO: 7890 - protein, 11 aa, Artificial
  IGFBP-2 heparin binding domain-containing peptide sequence
RHHIGIEEPHH

SEQ ID NO: 7891 - protein, 11 aa, Artificial
  IGFBP-2 heparin binding domain-containing peptide sequence
HHHIGIEEPHH

SEQ ID NO: 7892 - protein, 11 aa, Artificial
  IGFBP-2 heparin binding domain-containing peptide sequence
KKHIGIEEPHH

SEQ ID NO: 7893 - protein, 11 aa, Artificial
  IGFBP-2 heparin binding domain-containing peptide sequence
RKHIGIEEPHH

SEQ ID NO: 7894 - protein, 11 aa, Artificial
  IGFBP-2 heparin binding domain-containing peptide sequence
HKHIGIEEPHH

SEQ ID NO: 7895 - protein, 11 aa, Artificial
  IGFBP-2 heparin binding domain-containing peptide sequence
KRHIGIEEPHH

SEQ ID NO: 7896 - protein, 11 aa, Artificial
  IGFBP-2 heparin binding domain-containing peptide sequence
RRHIGIEEPHH

SEQ ID NO: 7897 - protein, 11 aa, Artificial
  IGFBP-2 heparin binding domain-containing peptide sequence
HRHIGIEEPHH

SEQ ID NO: 7898 - protein, 11 aa, Artificial
  IGFBP-2 heparin binding domain-containing peptide sequence
KHKIGIEEPHH

SEQ ID NO: 7899 - protein, 11 aa, Artificial
  IGFBP-2 heparin binding domain-containing peptide sequence
RHKIGIEEPHH

SEQ ID NO: 7900 - protein, 11 aa, Artificial
  IGFBP-2 heparin binding domain-containing peptide sequence
HHKIGIEEPHH

SEQ ID NO: 7901 - protein, 11 aa, Artificial
  IGFBP-2 heparin binding domain-containing peptide sequence
KKKIGIEEPHH

SEQ ID NO: 7902 - protein, 11 aa, Artificial
  IGFBP-2 heparin binding domain-containing peptide sequence
RKKIGIEEPHH

SEQ ID NO: 7903 - protein, 11 aa, Artificial
  IGFBP-2 heparin binding domain-containing peptide sequence
HKKIGIEEPHH

SEQ ID NO: 7904 - protein, 11 aa, Artificial
  IGFBP-2 heparin binding domain-containing peptide sequence
KRKIGIEEPHH

SEQ ID NO: 7905 - protein, 11 aa, Artificial
  IGFBP-2 heparin binding domain-containing peptide sequence
RRKIGIEEPHH

SEQ ID NO: 7906 - protein, 11 aa, Artificial
  IGFBP-2 heparin binding domain-containing peptide sequence
HRKIGIEEPHH

SEQ ID NO: 7907 - protein, 11 aa, Artificial
  IGFBP-2 heparin binding domain-containing peptide sequence
KHRIGIEEPHH

SEQ ID NO: 7908 - protein, 11 aa, Artificial
  IGFBP-2 heparin binding domain-containing peptide sequence
RHRIGIEEPHH

SEQ ID NO: 7909 - protein, 11 aa, Artificial
  IGFBP-2 heparin binding domain-containing peptide sequence
HHRIGIEEPHH

SEQ ID NO: 7910 - protein, 11 aa, Artificial
  IGFBP-2 heparin binding domain-containing peptide sequence
KKRIGIEEPHH

SEQ ID NO: 7911 - protein, 11 aa, Artificial
  IGFBP-2 heparin binding domain-containing peptide sequence
RKRIGIEEPHH

SEQ ID NO: 7912 - protein, 11 aa, Artificial
  IGFBP-2 heparin binding domain-containing peptide sequence
HKRIGIEEPHH

SEQ ID NO: 7913 - protein, 11 aa, Artificial
  IGFBP-2 heparin binding domain-containing peptide sequence
KRRIGIEEPHH

SEQ ID NO: 7914 - protein, 11 aa, Artificial
  IGFBP-2 heparin binding domain-containing peptide sequence
RRRIGIEEPHH

SEQ ID NO: 7915 - protein, 11 aa, Artificial
  IGFBP-2 heparin binding domain-containing peptide sequence
HRRIGIEEPHH

SEQ ID NO: 7916 - protein, 11 aa, Artificial
  IGFBP-2 heparin binding domain-containing peptide sequence
KHHVGIEEPHH

SEQ ID NO: 7917 - protein, 11 aa, Artificial
  IGFBP-2 heparin binding domain-containing peptide sequence
RHHVGIEEPHH

SEQ ID NO: 7918 - protein, 11 aa, Artificial
  IGFBP-2 heparin binding domain-containing peptide sequence
HHHVGIEEPHH

SEQ ID NO: 7919 - protein, 11 aa, Artificial
  IGFBP-2 heparin binding domain-containing peptide sequence
KKHVGIEEPHH

SEQ ID NO: 7920 - protein, 11 aa, Artificial
  IGFBP-2 heparin binding domain-containing peptide sequence
RKHVGIEEPHH

SEQ ID NO: 7921 - protein, 11 aa, Artificial
  IGFBP-2 heparin binding domain-containing peptide sequence
HKHVGIEEPHH

SEQ ID NO: 7922 - protein, 11 aa, Artificial
  IGFBP-2 heparin binding domain-containing peptide sequence
KRHVGIEEPHH

SEQ ID NO: 7923 - protein, 11 aa, Artificial
  IGFBP-2 heparin binding domain-containing peptide sequence
RRHVGIEEPHH

SEQ ID NO: 7924 - protein, 11 aa, Artificial
  IGFBP-2 heparin binding domain-containing peptide sequence
HRHVGIEEPHH

SEQ ID NO: 7925 - protein, 11 aa, Artificial
  IGFBP-2 heparin binding domain-containing peptide sequence
KHKVGIEEPHH

SEQ ID NO: 7926 - protein, 11 aa, Artificial
  IGFBP-2 heparin binding domain-containing peptide sequence
RHKVGIEEPHH

SEQ ID NO: 7927 - protein, 11 aa, Artificial
  IGFBP-2 heparin binding domain-containing peptide sequence
HHKVGIEEPHH

SEQ ID NO: 7928 - protein, 11 aa, Artificial
  IGFBP-2 heparin binding domain-containing peptide sequence
KKKVGIEEPHH

SEQ ID NO: 7929 - protein, 11 aa, Artificial
  IGFBP-2 heparin binding domain-containing peptide sequence
RKKVGIEEPHH

SEQ ID NO: 7930 - protein, 11 aa, Artificial
  IGFBP-2 heparin binding domain-containing peptide sequence
HKKVGIEEPHH

SEQ ID NO: 7931 - protein, 11 aa, Artificial
  IGFBP-2 heparin binding domain-containing peptide sequence
KRKVGIEEPHH

SEQ ID NO: 7932 - protein, 11 aa, Artificial
  IGFBP-2 heparin binding domain-containing peptide sequence
RRKVGIEEPHH

SEQ ID NO: 7933 - protein, 11 aa, Artificial
  IGFBP-2 heparin binding domain-containing peptide sequence
HRKVGIEEPHH

SEQ ID NO: 7934 - protein, 11 aa, Artificial
  IGFBP-2 heparin binding domain-containing peptide sequence
KHRVGIEEPHH

SEQ ID NO: 7935 - protein, 11 aa, Artificial
  IGFBP-2 heparin binding domain-containing peptide sequence
RHRVGIEEPHH

SEQ ID NO: 7936 - protein, 11 aa, Artificial
  IGFBP-2 heparin binding domain-containing peptide sequence
HHRVGIEEPHH

SEQ ID NO: 7937 - protein, 11 aa, Artificial
  IGFBP-2 heparin binding domain-containing peptide sequence
KKRVGIEEPHH

SEQ ID NO: 7938 - protein, 11 aa, Artificial
  IGFBP-2 heparin binding domain-containing peptide sequence
RKRVGIEEPHH

SEQ ID NO: 7939 - protein, 11 aa, Artificial
  IGFBP-2 heparin binding domain-containing peptide sequence
HKRVGIEEPHH

SEQ ID NO: 7940 - protein, 11 aa, Artificial
  IGFBP-2 heparin binding domain-containing peptide sequence
KRRVGIEEPHH

SEQ ID NO: 7941 - protein, 11 aa, Artificial
  IGFBP-2 heparin binding domain-containing peptide sequence
RRRVGIEEPHH

SEQ ID NO: 7942 - protein, 11 aa, Artificial
  IGFBP-2 heparin binding domain-containing peptide sequence
HRRVGIEEPHH

SEQ ID NO: 7943 - protein, 11 aa, Artificial
  IGFBP-2 heparin binding domain-containing peptide sequence
KHHLGVEEPHH

SEQ ID NO: 7944 - protein, 11 aa, Artificial
  IGFBP-2 heparin binding domain-containing peptide sequence
RHHLGVEEPHH

SEQ ID NO: 7945 - protein, 11 aa, Artificial
  IGFBP-2 heparin binding domain-containing peptide sequence
HHHLGVEEPHH

SEQ ID NO: 7946 - protein, 11 aa, Artificial
  IGFBP-2 heparin binding domain-containing peptide sequence
KKHLGVEEPHH

SEQ ID NO: 7947 - protein, 11 aa, Artificial
  IGFBP-2 heparin binding domain-containing peptide sequence
RKHLGVEEPHH

SEQ ID NO: 7948 - protein, 11 aa, Artificial
  IGFBP-2 heparin binding domain-containing peptide sequence
HKHLGVEEPHH

SEQ ID NO: 7949 - protein, 11 aa, Artificial
  IGFBP-2 heparin binding domain-containing peptide sequence
KRHLGVEEPHH

SEQ ID NO: 7950 - protein, 11 aa, Artificial
  IGFBP-2 heparin binding domain-containing peptide sequence
RRHLGVEEPHH

SEQ ID NO: 7951 - protein, 11 aa, Artificial
  IGFBP-2 heparin binding domain-containing peptide sequence
HRHLGVEEPHH

SEQ ID NO: 7952 - protein, 11 aa, Artificial
  IGFBP-2 heparin binding domain-containing peptide sequence
KHKLGVEEPHH

SEQ ID NO: 7953 - protein, 11 aa, Artificial
  IGFBP-2 heparin binding domain-containing peptide sequence
RHKLGVEEPHH

SEQ ID NO: 7954 - protein, 11 aa, Artificial
  IGFBP-2 heparin binding domain-containing peptide sequence
HHKLGVEEPHH

SEQ ID NO: 7955 - protein, 11 aa, Artificial
  IGFBP-2 heparin binding domain-containing peptide sequence
KKKLGVEEPHH

SEQ ID NO: 7956 - protein, 11 aa, Artificial
  IGFBP-2 heparin binding domain-containing peptide sequence
RKKLGVEEPHH

SEQ ID NO: 7957 - protein, 11 aa, Artificial
  IGFBP-2 heparin binding domain-containing peptide sequence
HKKLGVEEPHH

SEQ ID NO: 7958 - protein, 11 aa, Artificial
  IGFBP-2 heparin binding domain-containing peptide sequence
KRKLGVEEPHH

SEQ ID NO: 7959 - protein, 11 aa, Artificial
  IGFBP-2 heparin binding domain-containing peptide sequence
RRKLGVEEPHH

SEQ ID NO: 7960 - protein, 11 aa, Artificial
  IGFBP-2 heparin binding domain-containing peptide sequence
HRKLGVEEPHH

SEQ ID NO: 7961 - protein, 11 aa, Artificial
  IGFBP-2 heparin binding domain-containing peptide sequence
KHRLGVEEPHH

SEQ ID NO: 7962 - protein, 11 aa, Artificial
  IGFBP-2 heparin binding domain-containing peptide sequence
RHRLGVEEPHH

SEQ ID NO: 7963 - protein, 11 aa, Artificial
  IGFBP-2 heparin binding domain-containing peptide sequence
HHRLGVEEPHH

SEQ ID NO: 7964 - protein, 11 aa, Artificial
  IGFBP-2 heparin binding domain-containing peptide sequence
KKRLGVEEPHH

SEQ ID NO: 7965 - protein, 11 aa, Artificial
  IGFBP-2 heparin binding domain-containing peptide sequence
RKRLGVEEPHH

SEQ ID NO: 7966 - protein, 11 aa, Artificial
  IGFBP-2 heparin binding domain-containing peptide sequence
HKRLGVEEPHH

SEQ ID NO: 7967 - protein, 11 aa, Artificial
  IGFBP-2 heparin binding domain-containing peptide sequence
KRRLGVEEPHH

SEQ ID NO: 7968 - protein, 11 aa, Artificial
  IGFBP-2 heparin binding domain-containing peptide sequence
RRRLGVEEPHH

SEQ ID NO: 7969 - protein, 11 aa, Artificial
  IGFBP-2 heparin binding domain-containing peptide sequence
HRRLGVEEPHH

SEQ ID NO: 7970 - protein, 11 aa, Artificial
  IGFBP-2 heparin binding domain-containing peptide sequence
KHHIGVEEPHH

SEQ ID NO: 7971 - protein, 11 aa, Artificial
  IGFBP-2 heparin binding domain-containing peptide sequence
RHHIGVEEPHH

SEQ ID NO: 7972 - protein, 11 aa, Artificial
  IGFBP-2 heparin binding domain-containing peptide sequence
HHHIGVEEPHH

SEQ ID NO: 7973 - protein, 11 aa, Artificial
  IGFBP-2 heparin binding domain-containing peptide sequence
KKHIGVEEPHH

SEQ ID NO: 7974 - protein, 11 aa, Artificial
  IGFBP-2 heparin binding domain-containing peptide sequence
RKHIGVEEPHH

SEQ ID NO: 7975 - protein, 11 aa, Artificial
  IGFBP-2 heparin binding domain-containing peptide sequence
HKHIGVEEPHH

SEQ ID NO: 7976 - protein, 11 aa, Artificial
  IGFBP-2 heparin binding domain-containing peptide sequence
KRHIGVEEPHH

SEQ ID NO: 7977 - protein, 11 aa, Artificial
  IGFBP-2 heparin binding domain-containing peptide sequence
RRHIGVEEPHH

SEQ ID NO: 7978 - protein, 11 aa, Artificial
  IGFBP-2 heparin binding domain-containing peptide sequence
HRHIGVEEPHH

SEQ ID NO: 7979 - protein, 11 aa, Artificial
  IGFBP-2 heparin binding domain-containing peptide sequence
KHKIGVEEPHH

SEQ ID NO: 7980 - protein, 11 aa, Artificial
  IGFBP-2 heparin binding domain-containing peptide sequence
RHKIGVEEPHH

SEQ ID NO: 7981 - protein, 11 aa, Artificial
  IGFBP-2 heparin binding domain-containing peptide sequence
HHKIGVEEPHH

SEQ ID NO: 7982 - protein, 11 aa, Artificial
  IGFBP-2 heparin binding domain-containing peptide sequence
KKKIGVEEPHH

SEQ ID NO: 7983 - protein, 11 aa, Artificial
  IGFBP-2 heparin binding domain-containing peptide sequence
RKKIGVEEPHH

SEQ ID NO: 7984 - protein, 11 aa, Artificial
  IGFBP-2 heparin binding domain-containing peptide sequence
HKKIGVEEPHH

SEQ ID NO: 7985 - protein, 11 aa, Artificial
  IGFBP-2 heparin binding domain-containing peptide sequence
KRKIGVEEPHH

SEQ ID NO: 7986 - protein, 11 aa, Artificial
  IGFBP-2 heparin binding domain-containing peptide sequence
RRKIGVEEPHH

SEQ ID NO: 7987 - protein, 11 aa, Artificial
  IGFBP-2 heparin binding domain-containing peptide sequence
HRKIGVEEPHH

SEQ ID NO: 7988 - protein, 11 aa, Artificial
  IGFBP-2 heparin binding domain-containing peptide sequence
KHRIGVEEPHH

SEQ ID NO: 7989 - protein, 11 aa, Artificial
  IGFBP-2 heparin binding domain-containing peptide sequence
RHRIGVEEPHH

SEQ ID NO: 7990 - protein, 11 aa, Artificial
  IGFBP-2 heparin binding domain-containing peptide sequence
HHRIGVEEPHH

SEQ ID NO: 7991 - protein, 11 aa, Artificial
  IGFBP-2 heparin binding domain-containing peptide sequence
KKRIGVEEPHH

SEQ ID NO: 7992 - protein, 11 aa, Artificial
  IGFBP-2 heparin binding domain-containing peptide sequence
RKRIGVEEPHH

SEQ ID NO: 7993 - protein, 11 aa, Artificial
  IGFBP-2 heparin binding domain-containing peptide sequence
HKRIGVEEPHH

SEQ ID NO: 7994 - protein, 11 aa, Artificial
  IGFBP-2 heparin binding domain-containing peptide sequence
KRRIGVEEPHH

SEQ ID NO: 7995 - protein, 11 aa, Artificial
  IGFBP-2 heparin binding domain-containing peptide sequence
RRRIGVEEPHH

SEQ ID NO: 7996 - protein, 11 aa, Artificial
  IGFBP-2 heparin binding domain-containing peptide sequence
HRRIGVEEPHH

SEQ ID NO: 7997 - protein, 11 aa, Artificial
  IGFBP-2 heparin binding domain-containing peptide sequence
KHHVGVEEPHH

SEQ ID NO: 7998 - protein, 11 aa, Artificial
  IGFBP-2 heparin binding domain-containing peptide sequence
RHHVGVEEPHH

SEQ ID NO: 7999 - protein, 11 aa, Artificial
  IGFBP-2 heparin binding domain-containing peptide sequence
HHHVGVEEPHH

SEQ ID NO: 8000 - protein, 11 aa, Artificial
  IGFBP-2 heparin binding domain-containing peptide sequence
KKHVGVEEPHH

SEQ ID NO: 8001 - protein, 11 aa, Artificial
  IGFBP-2 heparin binding domain-containing peptide sequence
RKHVGVEEPHH

SEQ ID NO: 8002 - protein, 11 aa, Artificial
  IGFBP-2 heparin binding domain-containing peptide sequence
HKHVGVEEPHH

SEQ ID NO: 8003 - protein, 11 aa, Artificial
  IGFBP-2 heparin binding domain-containing peptide sequence
KRHVGVEEPHH

SEQ ID NO: 8004 - protein, 11 aa, Artificial
  IGFBP-2 heparin binding domain-containing peptide sequence
RRHVGVEEPHH

SEQ ID NO: 8005 - protein, 11 aa, Artificial
  IGFBP-2 heparin binding domain-containing peptide sequence
HRHVGVEEPHH

SEQ ID NO: 8006 - protein, 11 aa, Artificial
  IGFBP-2 heparin binding domain-containing peptide sequence
KHKVGVEEPHH

SEQ ID NO: 8007 - protein, 11 aa, Artificial
  IGFBP-2 heparin binding domain-containing peptide sequence
RHKVGVEEPHH

SEQ ID NO: 8008 - protein, 11 aa, Artificial
  IGFBP-2 heparin binding domain-containing peptide sequence
HHKVGVEEPHH

SEQ ID NO: 8009 - protein, 11 aa, Artificial
  IGFBP-2 heparin binding domain-containing peptide sequence
KKKVGVEEPHH

SEQ ID NO: 8010 - protein, 11 aa, Artificial
  IGFBP-2 heparin binding domain-containing peptide sequence
RKKVGVEEPHH

SEQ ID NO: 8011 - protein, 11 aa, Artificial
  IGFBP-2 heparin binding domain-containing peptide sequence
HKKVGVEEPHH

SEQ ID NO: 8012 - protein, 11 aa, Artificial
  IGFBP-2 heparin binding domain-containing peptide sequence
KRKVGVEEPHH

SEQ ID NO: 8013 - protein, 11 aa, Artificial
  IGFBP-2 heparin binding domain-containing peptide sequence
RRKVGVEEPHH

SEQ ID NO: 8014 - protein, 11 aa, Artificial
  IGFBP-2 heparin binding domain-containing peptide sequence
HRKVGVEEPHH

SEQ ID NO: 8015 - protein, 11 aa, Artificial
  IGFBP-2 heparin binding domain-containing peptide sequence
KHRVGVEEPHH

SEQ ID NO: 8016 - protein, 11 aa, Artificial
  IGFBP-2 heparin binding domain-containing peptide sequence
RHRVGVEEPHH

SEQ ID NO: 8017 - protein, 11 aa, Artificial
  IGFBP-2 heparin binding domain-containing peptide sequence
HHRVGVEEPHH

SEQ ID NO: 8018 - protein, 11 aa, Artificial
  IGFBP-2 heparin binding domain-containing peptide sequence
KKRVGVEEPHH

SEQ ID NO: 8019 - protein, 11 aa, Artificial
  IGFBP-2 heparin binding domain-containing peptide sequence
RKRVGVEEPHH

SEQ ID NO: 8020 - protein, 11 aa, Artificial
  IGFBP-2 heparin binding domain-containing peptide sequence
HKRVGVEEPHH

SEQ ID NO: 8021 - protein, 11 aa, Artificial
  IGFBP-2 heparin binding domain-containing peptide sequence
KRRVGVEEPHH

SEQ ID NO: 8022 - protein, 11 aa, Artificial
  IGFBP-2 heparin binding domain-containing peptide sequence
RRRVGVEEPHH

SEQ ID NO: 8023 - protein, 11 aa, Artificial
  IGFBP-2 heparin binding domain-containing peptide sequence
HRRVGVEEPHH

SEQ ID NO: 8024 - protein, 11 aa, Artificial
  IGFBP-2 heparin binding domain-containing peptide sequence
KHHLGLNEPHH

SEQ ID NO: 8025 - protein, 11 aa, Artificial
  IGFBP-2 heparin binding domain-containing peptide sequence
RHHLGLNEPHH

SEQ ID NO: 8026 - protein, 11 aa, Artificial
  IGFBP-2 heparin binding domain-containing peptide sequence
HHHLGLNEPHH

SEQ ID NO: 8027 - protein, 11 aa, Artificial
  IGFBP-2 heparin binding domain-containing peptide sequence
KKHLGLNEPHH

SEQ ID NO: 8028 - protein, 11 aa, Artificial
  IGFBP-2 heparin binding domain-containing peptide sequence
RKHLGLNEPHH

SEQ ID NO: 8029 - protein, 11 aa, Artificial
  IGFBP-2 heparin binding domain-containing peptide sequence
HKHLGLNEPHH

SEQ ID NO: 8030 - protein, 11 aa, Artificial
  IGFBP-2 heparin binding domain-containing peptide sequence
KRHLGLNEPHH

SEQ ID NO: 8031 - protein, 11 aa, Artificial
  IGFBP-2 heparin binding domain-containing peptide sequence
RRHLGLNEPHH

SEQ ID NO: 8032 - protein, 11 aa, Artificial
  IGFBP-2 heparin binding domain-containing peptide sequence
HRHLGLNEPHH

SEQ ID NO: 8033 - protein, 11 aa, Artificial
  IGFBP-2 heparin binding domain-containing peptide sequence
KHKLGLNEPHH

SEQ ID NO: 8034 - protein, 11 aa, Artificial
  IGFBP-2 heparin binding domain-containing peptide sequence
RHKLGLNEPHH

SEQ ID NO: 8035 - protein, 11 aa, Artificial
  IGFBP-2 heparin binding domain-containing peptide sequence
HHKLGLNEPHH

SEQ ID NO: 8036 - protein, 11 aa, Artificial
  IGFBP-2 heparin binding domain-containing peptide sequence
KKKLGLNEPHH

SEQ ID NO: 8037 - protein, 11 aa, Artificial
  IGFBP-2 heparin binding domain-containing peptide sequence
RKKLGLNEPHH

SEQ ID NO: 8038 - protein, 11 aa, Artificial
  IGFBP-2 heparin binding domain-containing peptide sequence
HKKLGLNEPHH

SEQ ID NO: 8039 - protein, 11 aa, Artificial
  IGFBP-2 heparin binding domain-containing peptide sequence
KRKLGLNEPHH

SEQ ID NO: 8040 - protein, 11 aa, Artificial
  IGFBP-2 heparin binding domain-containing peptide sequence
RRKLGLNEPHH

SEQ ID NO: 8041 - protein, 11 aa, Artificial
  IGFBP-2 heparin binding domain-containing peptide sequence
HRKLGLNEPHH

SEQ ID NO: 8042 - protein, 11 aa, Artificial
  IGFBP-2 heparin binding domain-containing peptide sequence
KHRLGLNEPHH

SEQ ID NO: 8043 - protein, 11 aa, Artificial
  IGFBP-2 heparin binding domain-containing peptide sequence
RHRLGLNEPHH

SEQ ID NO: 8044 - protein, 11 aa, Artificial
  IGFBP-2 heparin binding domain-containing peptide sequence
HHRLGLNEPHH

SEQ ID NO: 8045 - protein, 11 aa, Artificial
  IGFBP-2 heparin binding domain-containing peptide sequence
KKRLGLNEPHH

SEQ ID NO: 8046 - protein, 11 aa, Artificial
  IGFBP-2 heparin binding domain-containing peptide sequence
RKRLGLNEPHH

SEQ ID NO: 8047 - protein, 11 aa, Artificial
  IGFBP-2 heparin binding domain-containing peptide sequence
HKRLGLNEPHH

SEQ ID NO: 8048 - protein, 11 aa, Artificial
  IGFBP-2 heparin binding domain-containing peptide sequence
KRRLGLNEPHH

SEQ ID NO: 8049 - protein, 11 aa, Artificial
  IGFBP-2 heparin binding domain-containing peptide sequence
RRRLGLNEPHH

SEQ ID NO: 8050 - protein, 11 aa, Artificial
  IGFBP-2 heparin binding domain-containing peptide sequence
HRRLGLNEPHH

SEQ ID NO: 8051 - protein, 10 aa, Artificial
  IGFBP-2 heparin binding domain-containing peptide sequence
KHHIGLNPHH

SEQ ID NO: 8052 - protein, 11 aa, Artificial
  IGFBP-2 heparin binding domain-containing peptide sequence
RHHIGLNEPHH

SEQ ID NO: 8053 - protein, 11 aa, Artificial
  IGFBP-2 heparin binding domain-containing peptide sequence
HHHIGLNEPHH

SEQ ID NO: 8054 - protein, 11 aa, Artificial
  IGFBP-2 heparin binding domain-containing peptide sequence
KKHIGLNEPHH

SEQ ID NO: 8055 - protein, 11 aa, Artificial
  IGFBP-2 heparin binding domain-containing peptide sequence
RKHIGLNEPHH

SEQ ID NO: 8056 - protein, 11 aa, Artificial
  IGFBP-2 heparin binding domain-containing peptide sequence
HKHIGLNEPHH

SEQ ID NO: 8057 - protein, 11 aa, Artificial
  IGFBP-2 heparin binding domain-containing peptide sequence
KRHIGLNEPHH

SEQ ID NO: 8058 - protein, 11 aa, Artificial
  IGFBP-2 heparin binding domain-containing peptide sequence
RRHIGLNEPHH

SEQ ID NO: 8059 - protein, 11 aa, Artificial
  IGFBP-2 heparin binding domain-containing peptide sequence
HRHIGLNEPHH

SEQ ID NO: 8060 - protein, 11 aa, Artificial
  IGFBP-2 heparin binding domain-containing peptide sequence
KHKIGLNEPHH

SEQ ID NO: 8061 - protein, 11 aa, Artificial
  IGFBP-2 heparin binding domain-containing peptide sequence
RHKIGLNEPHH

SEQ ID NO: 8062 - protein, 11 aa, Artificial
  IGFBP-2 heparin binding domain-containing peptide sequence
HHKIGLNEPHH

SEQ ID NO: 8063 - protein, 11 aa, Artificial
  IGFBP-2 heparin binding domain-containing peptide sequence
KKKIGLNEPHH

SEQ ID NO: 8064 - protein, 11 aa, Artificial
  IGFBP-2 heparin binding domain-containing peptide sequence
RKKIGLNEPHH

SEQ ID NO: 8065 - protein, 11 aa, Artificial
  IGFBP-2 heparin binding domain-containing peptide sequence
HKKIGLNEPHH

SEQ ID NO: 8066 - protein, 11 aa, Artificial
  IGFBP-2 heparin binding domain-containing peptide sequence
KRKIGLNEPHH

SEQ ID NO: 8067 - protein, 11 aa, Artificial
  IGFBP-2 heparin binding domain-containing peptide sequence
RRKIGLNEPHH

SEQ ID NO: 8068 - protein, 11 aa, Artificial
  IGFBP-2 heparin binding domain-containing peptide sequence
HRKIGLNEPHH

SEQ ID NO: 8069 - protein, 11 aa, Artificial
  IGFBP-2 heparin binding domain-containing peptide sequence
KHRIGLNEPHH

SEQ ID NO: 8070 - protein, 11 aa, Artificial
  IGFBP-2 heparin binding domain-containing peptide sequence
RHRIGLNEPHH

SEQ ID NO: 8071 - protein, 11 aa, Artificial
  IGFBP-2 heparin binding domain-containing peptide sequence
HHRIGLNEPHH

SEQ ID NO: 8072 - protein, 11 aa, Artificial
  IGFBP-2 heparin binding domain-containing peptide sequence
KKRIGLNEPHH

SEQ ID NO: 8073 - protein, 11 aa, Artificial
  IGFBP-2 heparin binding domain-containing peptide sequence
RKRIGLNEPHH

SEQ ID NO: 8074 - protein, 11 aa, Artificial
  IGFBP-2 heparin binding domain-containing peptide sequence
HKRIGLNEPHH

SEQ ID NO: 8075 - protein, 11 aa, Artificial
  IGFBP-2 heparin binding domain-containing peptide sequence
KRRIGLNEPHH

SEQ ID NO: 8076 - protein, 11 aa, Artificial
  IGFBP-2 heparin binding domain-containing peptide sequence
RRRIGLNEPHH

SEQ ID NO: 8077 - protein, 11 aa, Artificial
  IGFBP-2 heparin binding domain-containing peptide sequence
HRRIGLNEPHH

SEQ ID NO: 8078 - protein, 11 aa, Artificial
  IGFBP-2 heparin binding domain-containing peptide sequence
KHHVGLNEPHH

SEQ ID NO: 8079 - protein, 11 aa, Artificial
  IGFBP-2 heparin binding domain-containing peptide sequence
RHHVGLNEPHH

SEQ ID NO: 8080 - protein, 11 aa, Artificial
  IGFBP-2 heparin binding domain-containing peptide sequence
HHHVGLNEPHH

SEQ ID NO: 8081 - protein, 11 aa, Artificial
  IGFBP-2 heparin binding domain-containing peptide sequence
KKHVGLNEPHH

SEQ ID NO: 8082 - protein, 11 aa, Artificial
  IGFBP-2 heparin binding domain-containing peptide sequence
RKHVGLNEPHH

SEQ ID NO: 8083 - protein, 11 aa, Artificial
  IGFBP-2 heparin binding domain-containing peptide sequence
HKHVGLNEPHH

SEQ ID NO: 8084 - protein, 11 aa, Artificial
  IGFBP-2 heparin binding domain-containing peptide sequence
KRHVGLNEPHH

SEQ ID NO: 8085 - protein, 11 aa, Artificial
  IGFBP-2 heparin binding domain-containing peptide sequence
RRHVGLNEPHH

SEQ ID NO: 8086 - protein, 11 aa, Artificial
  IGFBP-2 heparin binding domain-containing peptide sequence
HRHVGLNEPHH

SEQ ID NO: 8087 - protein, 11 aa, Artificial
  IGFBP-2 heparin binding domain-containing peptide sequence
KHKVGLNEPHH

SEQ ID NO: 8088 - protein, 11 aa, Artificial
  IGFBP-2 heparin binding domain-containing peptide sequence
RHKVGLNEPHH

SEQ ID NO: 8089 - protein, 11 aa, Artificial
  IGFBP-2 heparin binding domain-containing peptide sequence
HHKVGLNEPHH

SEQ ID NO: 8090 - protein, 11 aa, Artificial
  IGFBP-2 heparin binding domain-containing peptide sequence
KKKVGLNEPHH

SEQ ID NO: 8091 - protein, 11 aa, Artificial
  IGFBP-2 heparin binding domain-containing peptide sequence
RKKVGLNEPHH

SEQ ID NO: 8092 - protein, 11 aa, Artificial
  IGFBP-2 heparin binding domain-containing peptide sequence
HKKVGLNEPHH

SEQ ID NO: 8093 - protein, 11 aa, Artificial
  IGFBP-2 heparin binding domain-containing peptide sequence
KRKVGLNEPHH

SEQ ID NO: 8094 - protein, 11 aa, Artificial
  IGFBP-2 heparin binding domain-containing peptide sequence
RRKVGLNEPHH

SEQ ID NO: 8095 - protein, 11 aa, Artificial
  IGFBP-2 heparin binding domain-containing peptide sequence
HRKVGLNEPHH

SEQ ID NO: 8096 - protein, 11 aa, Artificial
  IGFBP-2 heparin binding domain-containing peptide sequence
KHRVGLNEPHH

SEQ ID NO: 8097 - protein, 11 aa, Artificial
  IGFBP-2 heparin binding domain-containing peptide sequence
RHRVGLNEPHH

SEQ ID NO: 8098 - protein, 11 aa, Artificial
  IGFBP-2 heparin binding domain-containing peptide sequence
HHRVGLNEPHH

SEQ ID NO: 8099 - protein, 11 aa, Artificial
  IGFBP-2 heparin binding domain-containing peptide sequence
KKRVGLNEPHH

SEQ ID NO: 8100 - protein, 11 aa, Artificial
  IGFBP-2 heparin binding domain-containing peptide sequence
RKRVGLNEPHH

SEQ ID NO: 8101 - protein, 11 aa, Artificial
  IGFBP-2 heparin binding domain-containing peptide sequence
HKRVGLNEPHH

SEQ ID NO: 8102 - protein, 11 aa, Artificial
  IGFBP-2 heparin binding domain-containing peptide sequence
KRRVGLNEPHH

SEQ ID NO: 8103 - protein, 11 aa, Artificial
  IGFBP-2 heparin binding domain-containing peptide sequence
RRRVGLNEPHH

SEQ ID NO: 8104 - protein, 11 aa, Artificial
  IGFBP-2 heparin binding domain-containing peptide sequence
HRRVGLNEPHH

SEQ ID NO: 8105 - protein, 11 aa, Artificial
  IGFBP-2 heparin binding domain-containing peptide sequence
KHHLGINEPHH

SEQ ID NO: 8106 - protein, 11 aa, Artificial
  IGFBP-2 heparin binding domain-containing peptide sequence
RHHLGINEPHH

SEQ ID NO: 8107 - protein, 11 aa, Artificial
  IGFBP-2 heparin binding domain-containing peptide sequence
HHHLGINEPHH

SEQ ID NO: 8108 - protein, 11 aa, Artificial
  IGFBP-2 heparin binding domain-containing peptide sequence
KKHLGINEPHH

SEQ ID NO: 8109 - protein, 11 aa, Artificial
  IGFBP-2 heparin binding domain-containing peptide sequence
RKHLGINEPHH

SEQ ID NO: 8110 - protein, 11 aa, Artificial
  IGFBP-2 heparin binding domain-containing peptide sequence
HKHLGINEPHH

SEQ ID NO: 8111 - protein, 11 aa, Artificial
  IGFBP-2 heparin binding domain-containing peptide sequence
KRHLGINEPHH

SEQ ID NO: 8112 - protein, 11 aa, Artificial
  IGFBP-2 heparin binding domain-containing peptide sequence
RRHLGINEPHH

SEQ ID NO: 8113 - protein, 11 aa, Artificial
  IGFBP-2 heparin binding domain-containing peptide sequence
HRHLGINEPHH

SEQ ID NO: 8114 - protein, 11 aa, Artificial
  IGFBP-2 heparin binding domain-containing peptide sequence
KHKLGINEPHH

SEQ ID NO: 8115 - protein, 11 aa, Artificial
  IGFBP-2 heparin binding domain-containing peptide sequence
RHKLGINEPHH

SEQ ID NO: 8116 - protein, 11 aa, Artificial
  IGFBP-2 heparin binding domain-containing peptide sequence
HHKLGINEPHH

SEQ ID NO: 8117 - protein, 11 aa, Artificial
  IGFBP-2 heparin binding domain-containing peptide sequence
KKKLGINEPHH

SEQ ID NO: 8118 - protein, 11 aa, Artificial
  IGFBP-2 heparin binding domain-containing peptide sequence
RKKLGINEPHH

SEQ ID NO: 8119 - protein, 11 aa, Artificial
  IGFBP-2 heparin binding domain-containing peptide sequence
HKKLGINEPHH

SEQ ID NO: 8120 - protein, 11 aa, Artificial
  IGFBP-2 heparin binding domain-containing peptide sequence
KRKLGINEPHH

SEQ ID NO: 8121 - protein, 11 aa, Artificial
  IGFBP-2 heparin binding domain-containing peptide sequence
RRKLGINEPHH

SEQ ID NO: 8122 - protein, 11 aa, Artificial
  IGFBP-2 heparin binding domain-containing peptide sequence
HRKLGINEPHH

SEQ ID NO: 8123 - protein, 11 aa, Artificial
  IGFBP-2 heparin binding domain-containing peptide sequence
KHRLGINEPHH

SEQ ID NO: 8124 - protein, 11 aa, Artificial
  IGFBP-2 heparin binding domain-containing peptide sequence
RHRLGINEPHH

SEQ ID NO: 8125 - protein, 11 aa, Artificial
  IGFBP-2 heparin binding domain-containing peptide sequence
HHRLGINEPHH

SEQ ID NO: 8126 - protein, 11 aa, Artificial
  IGFBP-2 heparin binding domain-containing peptide sequence
KKRLGINEPHH

SEQ ID NO: 8127 - protein, 11 aa, Artificial
  IGFBP-2 heparin binding domain-containing peptide sequence
RKRLGINEPHH

SEQ ID NO: 8128 - protein, 11 aa, Artificial
  IGFBP-2 heparin binding domain-containing peptide sequence
HKRLGINEPHH

SEQ ID NO: 8129 - protein, 11 aa, Artificial
  IGFBP-2 heparin binding domain-containing peptide sequence
KRRLGINEPHH

SEQ ID NO: 8130 - protein, 11 aa, Artificial
  IGFBP-2 heparin binding domain-containing peptide sequence
RRRLGINEPHH

SEQ ID NO: 8131 - protein, 11 aa, Artificial
  IGFBP-2 heparin binding domain-containing peptide sequence
HRRLGINEPHH

SEQ ID NO: 8132 - protein, 11 aa, Artificial
  IGFBP-2 heparin binding domain-containing peptide sequence
KHHIGIENPHH

SEQ ID NO: 8133 - protein, 11 aa, Artificial
  IGFBP-2 heparin binding domain-containing peptide sequence
RHHIGINEPHH

SEQ ID NO: 8134 - protein, 11 aa, Artificial
  IGFBP-2 heparin binding domain-containing peptide sequence
HHHIGINEPHH

SEQ ID NO: 8135 - protein, 11 aa, Artificial
  IGFBP-2 heparin binding domain-containing peptide sequence
KKHIGINEPHH

SEQ ID NO: 8136 - protein, 11 aa, Artificial
  IGFBP-2 heparin binding domain-containing peptide sequence
RKHIGINEPHH

SEQ ID NO: 8137 - protein, 11 aa, Artificial
  IGFBP-2 heparin binding domain-containing peptide sequence
HKHIGINEPHH

SEQ ID NO: 8138 - protein, 11 aa, Artificial
  IGFBP-2 heparin binding domain-containing peptide sequence
KRHIGINEPHH

SEQ ID NO: 8139 - protein, 11 aa, Artificial
  IGFBP-2 heparin binding domain-containing peptide sequence
RRHIGINEPHH

SEQ ID NO: 8140 - protein, 11 aa, Artificial
  IGFBP-2 heparin binding domain-containing peptide sequence
HRHIGINEPHH

SEQ ID NO: 8141 - protein, 11 aa, Artificial
  IGFBP-2 heparin binding domain-containing peptide sequence
KHKIGINEPHH

SEQ ID NO: 8142 - protein, 11 aa, Artificial
  IGFBP-2 heparin binding domain-containing peptide sequence
RHKIGINEPHH

SEQ ID NO: 8143 - protein, 11 aa, Artificial
  IGFBP-2 heparin binding domain-containing peptide sequence
HHKIGINEPHH

SEQ ID NO: 8144 - protein, 11 aa, Artificial
  IGFBP-2 heparin binding domain-containing peptide sequence
KKKIGINEPHH

SEQ ID NO: 8145 - protein, 11 aa, Artificial
  IGFBP-2 heparin binding domain-containing peptide sequence
RKKIGINEPHH

SEQ ID NO: 8146 - protein, 11 aa, Artificial
  IGFBP-2 heparin binding domain-containing peptide sequence
HKKIGINEPHH

SEQ ID NO: 8147 - protein, 11 aa, Artificial
  IGFBP-2 heparin binding domain-containing peptide sequence
KRKIGINEPHH

SEQ ID NO: 8148 - protein, 11 aa, Artificial
  IGFBP-2 heparin binding domain-containing peptide sequence
RRKIGINEPHH

SEQ ID NO: 8149 - protein, 11 aa, Artificial
  IGFBP-2 heparin binding domain-containing peptide sequence
HRKIGINEPHH

SEQ ID NO: 8150 - protein, 11 aa, Artificial
  IGFBP-2 heparin binding domain-containing peptide sequence
KHRIGINEPHH

SEQ ID NO: 8151 - protein, 11 aa, Artificial
  IGFBP-2 heparin binding domain-containing peptide sequence
RHRIGINEPHH

SEQ ID NO: 8152 - protein, 11 aa, Artificial
  IGFBP-2 heparin binding domain-containing peptide sequence
HHRIGINEPHH

SEQ ID NO: 8153 - protein, 11 aa, Artificial
  IGFBP-2 heparin binding domain-containing peptide sequence
KKRIGINEPHH

SEQ ID NO: 8154 - protein, 11 aa, Artificial
  IGFBP-2 heparin binding domain-containing peptide sequence
RKRIGINEPHH

SEQ ID NO: 8155 - protein, 11 aa, Artificial
  IGFBP-2 heparin binding domain-containing peptide sequence
HKRIGINEPHH

SEQ ID NO: 8156 - protein, 11 aa, Artificial
  IGFBP-2 heparin binding domain-containing peptide sequence
KRRIGINEPHH

SEQ ID NO: 8157 - protein, 11 aa, Artificial
  IGFBP-2 heparin binding domain-containing peptide sequence
RRRIGINEPHH

SEQ ID NO: 8158 - protein, 11 aa, Artificial
  IGFBP-2 heparin binding domain-containing peptide sequence
HRRIGINEPHH

SEQ ID NO: 8159 - protein, 11 aa, Artificial
  IGFBP-2 heparin binding domain-containing peptide sequence
KHHVGINEPHH

SEQ ID NO: 8160 - protein, 11 aa, Artificial
  IGFBP-2 heparin binding domain-containing peptide sequence
RHHVGINEPHH

SEQ ID NO: 8161 - protein, 11 aa, Artificial
  IGFBP-2 heparin binding domain-containing peptide sequence
HHHVGINEPHH

SEQ ID NO: 8162 - protein, 11 aa, Artificial
  IGFBP-2 heparin binding domain-containing peptide sequence
KKHVGINEPHH

SEQ ID NO: 8163 - protein, 11 aa, Artificial
  IGFBP-2 heparin binding domain-containing peptide sequence
RKHVGINEPHH

SEQ ID NO: 8164 - protein, 11 aa, Artificial
  IGFBP-2 heparin binding domain-containing peptide sequence
HKHVGINEPHH

SEQ ID NO: 8165 - protein, 11 aa, Artificial
  IGFBP-2 heparin binding domain-containing peptide sequence
KRHVGINEPHH

SEQ ID NO: 8166 - protein, 11 aa, Artificial
  IGFBP-2 heparin binding domain-containing peptide sequence
RRHVGINEPHH

SEQ ID NO: 8167 - protein, 11 aa, Artificial
  IGFBP-2 heparin binding domain-containing peptide sequence
HRHVGINEPHH

SEQ ID NO: 8168 - protein, 11 aa, Artificial
  IGFBP-2 heparin binding domain-containing peptide sequence
KHKVGINEPHH

SEQ ID NO: 8169 - protein, 11 aa, Artificial
  IGFBP-2 heparin binding domain-containing peptide sequence
RHKVGINEPHH

SEQ ID NO: 8170 - protein, 11 aa, Artificial
  IGFBP-2 heparin binding domain-containing peptide sequence
HHKVGINEPHH

SEQ ID NO: 8171 - protein, 11 aa, Artificial
  IGFBP-2 heparin binding domain-containing peptide sequence
KKKVGINEPHH

SEQ ID NO: 8172 - protein, 11 aa, Artificial
  IGFBP-2 heparin binding domain-containing peptide sequence
RKKVGINEPHH

SEQ ID NO: 8173 - protein, 11 aa, Artificial
  IGFBP-2 heparin binding domain-containing peptide sequence
HKKVGINEPHH

SEQ ID NO: 8174 - protein, 11 aa, Artificial
  IGFBP-2 heparin binding domain-containing peptide sequence
KRKVGINEPHH

SEQ ID NO: 8175 - protein, 11 aa, Artificial
  IGFBP-2 heparin binding domain-containing peptide sequence
RRKVGINEPHH

SEQ ID NO: 8176 - protein, 11 aa, Artificial
  IGFBP-2 heparin binding domain-containing peptide sequence
HRKVGINEPHH

SEQ ID NO: 8177 - protein, 11 aa, Artificial
  IGFBP-2 heparin binding domain-containing peptide sequence
KHRVGINEPHH

SEQ ID NO: 8178 - protein, 11 aa, Artificial
  IGFBP-2 heparin binding domain-containing peptide sequence
RHRVGINEPHH

SEQ ID NO: 8179 - protein, 11 aa, Artificial
  IGFBP-2 heparin binding domain-containing peptide sequence
HHRVGINEPHH

SEQ ID NO: 8180 - protein, 11 aa, Artificial
  IGFBP-2 heparin binding domain-containing peptide sequence
KKRVGINEPHH

SEQ ID NO: 8181 - protein, 11 aa, Artificial
  IGFBP-2 heparin binding domain-containing peptide sequence
RKRVGINEPHH

SEQ ID NO: 8182 - protein, 11 aa, Artificial
  IGFBP-2 heparin binding domain-containing peptide sequence
HKRVGINEPHH

SEQ ID NO: 8183 - protein, 11 aa, Artificial
  IGFBP-2 heparin binding domain-containing peptide sequence
KRRVGINEPHH

SEQ ID NO: 8184 - protein, 11 aa, Artificial
  IGFBP-2 heparin binding domain-containing peptide sequence
RRRVGINEPHH

SEQ ID NO: 8185 - protein, 11 aa, Artificial
  IGFBP-2 heparin binding domain-containing peptide sequence
HRRVGINEPHH

SEQ ID NO: 8186 - protein, 11 aa, Artificial
  IGFBP-2 heparin binding domain-containing peptide sequence
KHHLGVNEPHH

SEQ ID NO: 8187 - protein, 11 aa, Artificial
  IGFBP-2 heparin binding domain-containing peptide sequence
RHHLGVNEPHH

SEQ ID NO: 8188 - protein, 11 aa, Artificial
  IGFBP-2 heparin binding domain-containing peptide sequence
HHHLGVNEPHH

SEQ ID NO: 8189 - protein, 11 aa, Artificial
  IGFBP-2 heparin binding domain-containing peptide sequence
KKHLGVNEPHH

SEQ ID NO: 8190 - protein, 11 aa, Artificial
  IGFBP-2 heparin binding domain-containing peptide sequence
RKHLGVNEPHH

SEQ ID NO: 8191 - protein, 11 aa, Artificial
  IGFBP-2 heparin binding domain-containing peptide sequence
HKHLGVNEPHH

SEQ ID NO: 8192 - protein, 11 aa, Artificial
  IGFBP-2 heparin binding domain-containing peptide sequence
KRHLGVNEPHH

SEQ ID NO: 8193 - protein, 11 aa, Artificial
  IGFBP-2 heparin binding domain-containing peptide sequence
RRHLGVNEPHH

SEQ ID NO: 8194 - protein, 11 aa, Artificial
  IGFBP-2 heparin binding domain-containing peptide sequence
HRHLGVNEPHH

SEQ ID NO: 8195 - protein, 11 aa, Artificial
  IGFBP-2 heparin binding domain-containing peptide sequence
KHKLGVNEPHH

SEQ ID NO: 8196 - protein, 11 aa, Artificial
  IGFBP-2 heparin binding domain-containing peptide sequence
RHKLGVNEPHH

SEQ ID NO: 8197 - protein, 11 aa, Artificial
  IGFBP-2 heparin binding domain-containing peptide sequence
HHKLGVNEPHH

SEQ ID NO: 8198 - protein, 11 aa, Artificial
  IGFBP-2 heparin binding domain-containing peptide sequence
KKKLGVNEPHH

SEQ ID NO: 8199 - protein, 11 aa, Artificial
  IGFBP-2 heparin binding domain-containing peptide sequence
RKKLGVNEPHH

SEQ ID NO: 8200 - protein, 11 aa, Artificial
  IGFBP-2 heparin binding domain-containing peptide sequence
HKKLGVNEPHH

SEQ ID NO: 8201 - protein, 11 aa, Artificial
  IGFBP-2 heparin binding domain-containing peptide sequence
KRKLGVNEPHH

SEQ ID NO: 8202 - protein, 11 aa, Artificial
  IGFBP-2 heparin binding domain-containing peptide sequence
RRKLGVNEPHH

SEQ ID NO: 8203 - protein, 11 aa, Artificial
  IGFBP-2 heparin binding domain-containing peptide sequence
HRKLGVNEPHH

SEQ ID NO: 8204 - protein, 11 aa, Artificial
  IGFBP-2 heparin binding domain-containing peptide sequence
KHRLGVNEPHH

SEQ ID NO: 8205 - protein, 11 aa, Artificial
  IGFBP-2 heparin binding domain-containing peptide sequence
RHRLGVNEPHH

SEQ ID NO: 8206 - protein, 11 aa, Artificial
  IGFBP-2 heparin binding domain-containing peptide sequence
HHRLGVNEPHH

SEQ ID NO: 8207 - protein, 11 aa, Artificial
  IGFBP-2 heparin binding domain-containing peptide sequence
KKRLGVNEPHH

SEQ ID NO: 8208 - protein, 11 aa, Artificial
  IGFBP-2 heparin binding domain-containing peptide sequence
RKRLGVNEPHH

SEQ ID NO: 8209 - protein, 11 aa, Artificial
  IGFBP-2 heparin binding domain-containing peptide sequence
HKRLGVNEPHH

SEQ ID NO: 8210 - protein, 11 aa, Artificial
  IGFBP-2 heparin binding domain-containing peptide sequence
KRRLGVNEPHH

SEQ ID NO: 8211 - protein, 11 aa, Artificial
  IGFBP-2 heparin binding domain-containing peptide sequence
RRRLGVNEPHH

SEQ ID NO: 8212 - protein, 11 aa, Artificial
  IGFBP-2 heparin binding domain-containing peptide sequence
HRRLGVNEPHH

SEQ ID NO: 8213 - protein, 11 aa, Artificial
  IGFBP-2 heparin binding domain-containing peptide sequence
KHHIGVNEPHH

SEQ ID NO: 8214 - protein, 11 aa, Artificial
  IGFBP-2 heparin binding domain-containing peptide sequence
RHHIGVNEPHH

SEQ ID NO: 8215 - protein, 11 aa, Artificial
  IGFBP-2 heparin binding domain-containing peptide sequence
HHHIGVNEPHH

SEQ ID NO: 8216 - protein, 11 aa, Artificial
  IGFBP-2 heparin binding domain-containing peptide sequence
KKHIGVNEPHH

SEQ ID NO: 8217 - protein, 11 aa, Artificial
  IGFBP-2 heparin binding domain-containing peptide sequence
RKHIGVNEPHH

SEQ ID NO: 8218 - protein, 11 aa, Artificial
  IGFBP-2 heparin binding domain-containing peptide sequence
HKHIGVNEPHH

SEQ ID NO: 8219 - protein, 11 aa, Artificial
  IGFBP-2 heparin binding domain-containing peptide sequence
KRHIGVNEPHH

SEQ ID NO: 8220 - protein, 11 aa, Artificial
  IGFBP-2 heparin binding domain-containing peptide sequence
RRHIGVNEPHH

SEQ ID NO: 8221 - protein, 11 aa, Artificial
  IGFBP-2 heparin binding domain-containing peptide sequence
HRHIGVNEPHH

SEQ ID NO: 8222 - protein, 11 aa, Artificial
  IGFBP-2 heparin binding domain-containing peptide sequence
KHKIGVNEPHH

SEQ ID NO: 8223 - protein, 11 aa, Artificial
  IGFBP-2 heparin binding domain-containing peptide sequence
RHKIGVNEPHH

SEQ ID NO: 8224 - protein, 11 aa, Artificial
  IGFBP-2 heparin binding domain-containing peptide sequence
HHKIGVNEPHH

SEQ ID NO: 8225 - protein, 11 aa, Artificial
  IGFBP-2 heparin binding domain-containing peptide sequence
KKKIGVNEPHH

SEQ ID NO: 8226 - protein, 11 aa, Artificial
  IGFBP-2 heparin binding domain-containing peptide sequence
RKKIGVNEPHH

SEQ ID NO: 8227 - protein, 11 aa, Artificial
  IGFBP-2 heparin binding domain-containing peptide sequence
HKKIGVNEPHH

SEQ ID NO: 8228 - protein, 11 aa, Artificial
  IGFBP-2 heparin binding domain-containing peptide sequence
KRKIGVNEPHH

SEQ ID NO: 8229 - protein, 11 aa, Artificial
  IGFBP-2 heparin binding domain-containing peptide sequence
RRKIGVNEPHH

SEQ ID NO: 8230 - protein, 11 aa, Artificial
  IGFBP-2 heparin binding domain-containing peptide sequence
HRKIGVNEPHH

SEQ ID NO: 8231 - protein, 11 aa, Artificial
  IGFBP-2 heparin binding domain-containing peptide sequence
KHRIGVNEPHH

SEQ ID NO: 8232 - protein, 11 aa, Artificial
  IGFBP-2 heparin binding domain-containing peptide sequence
RHRIGVNEPHH

SEQ ID NO: 8233 - protein, 11 aa, Artificial
  IGFBP-2 heparin binding domain-containing peptide sequence
HHRIGVNEPHH

SEQ ID NO: 8234 - protein, 11 aa, Artificial
  IGFBP-2 heparin binding domain-containing peptide sequence
KKRIGVNEPHH

SEQ ID NO: 8235 - protein, 11 aa, Artificial
  IGFBP-2 heparin binding domain-containing peptide sequence
RKRIGVNEPHH

SEQ ID NO: 8236 - protein, 11 aa, Artificial
  IGFBP-2 heparin binding domain-containing peptide sequence
HKRIGVNEPHH

SEQ ID NO: 8237 - protein, 11 aa, Artificial
  IGFBP-2 heparin binding domain-containing peptide sequence
KRRIGVNEPHH

SEQ ID NO: 8238 - protein, 11 aa, Artificial
  IGFBP-2 heparin binding domain-containing peptide sequence
RRRIGVNEPHH

SEQ ID NO: 8239 - protein, 11 aa, Artificial
  IGFBP-2 heparin binding domain-containing peptide sequence
HRRIGVNEPHH

SEQ ID NO: 8240 - protein, 11 aa, Artificial
  IGFBP-2 heparin binding domain-containing peptide sequence
KHHVGVNEPHH

SEQ ID NO: 8241 - protein, 11 aa, Artificial
  IGFBP-2 heparin binding domain-containing peptide sequence
RHHVGVNEPHH

SEQ ID NO: 8242 - protein, 11 aa, Artificial
  IGFBP-2 heparin binding domain-containing peptide sequence
HHHVGVNEPHH

SEQ ID NO: 8243 - protein, 11 aa, Artificial
  IGFBP-2 heparin binding domain-containing peptide sequence
KKHVGVNEPHH

SEQ ID NO: 8244 - protein, 11 aa, Artificial
  IGFBP-2 heparin binding domain-containing peptide sequence
RKHVGVNEPHH

SEQ ID NO: 8245 - protein, 11 aa, Artificial
  IGFBP-2 heparin binding domain-containing peptide sequence
HKHVGVNEPHH

SEQ ID NO: 8246 - protein, 11 aa, Artificial
  IGFBP-2 heparin binding domain-containing peptide sequence
KRHVGVNEPHH

SEQ ID NO: 8247 - protein, 11 aa, Artificial
  IGFBP-2 heparin binding domain-containing peptide sequence
RRHVGVNEPHH

SEQ ID NO: 8248 - protein, 11 aa, Artificial
  IGFBP-2 heparin binding domain-containing peptide sequence
HRHVGVNEPHH

SEQ ID NO: 8249 - protein, 11 aa, Artificial
  IGFBP-2 heparin binding domain-containing peptide sequence
KHKVGVNEPHH

SEQ ID NO: 8250 - protein, 11 aa, Artificial
  IGFBP-2 heparin binding domain-containing peptide sequence
RHKVGVNEPHH

SEQ ID NO: 8251 - protein, 11 aa, Artificial
  IGFBP-2 heparin binding domain-containing peptide sequence
HHKVGVNEPHH

SEQ ID NO: 8252 - protein, 11 aa, Artificial
  IGFBP-2 heparin binding domain-containing peptide sequence
KKKVGVNEPHH

SEQ ID NO: 8253 - protein, 11 aa, Artificial
  IGFBP-2 heparin binding domain-containing peptide sequence
RKKVGVNEPHH

SEQ ID NO: 8254 - protein, 11 aa, Artificial
  IGFBP-2 heparin binding domain-containing peptide sequence
HKKVGVNEPHH

SEQ ID NO: 8255 - protein, 11 aa, Artificial
  IGFBP-2 heparin binding domain-containing peptide sequence
KRKVGVNEPHH

SEQ ID NO: 8256 - protein, 11 aa, Artificial
  IGFBP-2 heparin binding domain-containing peptide sequence
RRKVGVNEPHH

SEQ ID NO: 8257 - protein, 11 aa, Artificial
  IGFBP-2 heparin binding domain-containing peptide sequence
HRKVGVNEPHH

SEQ ID NO: 8258 - protein, 11 aa, Artificial
  IGFBP-2 heparin binding domain-containing peptide sequence
KHRVGVNEPHH

SEQ ID NO: 8259 - protein, 11 aa, Artificial
  IGFBP-2 heparin binding domain-containing peptide sequence
RHRVGVNEPHH

SEQ ID NO: 8260 - protein, 11 aa, Artificial
  IGFBP-2 heparin binding domain-containing peptide sequence
HHRVGVNEPHH

SEQ ID NO: 8261 - protein, 11 aa, Artificial
  IGFBP-2 heparin binding domain-containing peptide sequence
KKRVGVNEPHH

SEQ ID NO: 8262 - protein, 11 aa, Artificial
  IGFBP-2 heparin binding domain-containing peptide sequence
RKRVGVNEPHH

SEQ ID NO: 8263 - protein, 11 aa, Artificial
  IGFBP-2 heparin binding domain-containing peptide sequence
HKRVGVNEPHH

SEQ ID NO: 8264 - protein, 11 aa, Artificial
  IGFBP-2 heparin binding domain-containing peptide sequence
KRRVGVNEPHH

SEQ ID NO: 8265 - protein, 11 aa, Artificial
  IGFBP-2 heparin binding domain-containing peptide sequence
RRRVGVNEPHH

SEQ ID NO: 8266 - protein, 11 aa, Artificial
  IGFBP-2 heparin binding domain-containing peptide sequence
HRRVGVNEPHH

SEQ ID NO: 8267 - protein, 11 aa, Artificial
  IGFBP-2 heparin binding domain-containing peptide sequence
KHHLGLENPHH

SEQ ID NO: 8268 - protein, 11 aa, Artificial
  IGFBP-2 heparin binding domain-containing peptide sequence
RHHLGLENPHH

SEQ ID NO: 8269 - protein, 11 aa, Artificial
  IGFBP-2 heparin binding domain-containing peptide sequence
HHHLGLENPHH

SEQ ID NO: 8270 - protein, 11 aa, Artificial
  IGFBP-2 heparin binding domain-containing peptide sequence
KKHLGLENPHH

SEQ ID NO: 8271 - protein, 11 aa, Artificial
  IGFBP-2 heparin binding domain-containing peptide sequence
RKHLGLENPHH

SEQ ID NO: 8272 - protein, 11 aa, Artificial
  IGFBP-2 heparin binding domain-containing peptide sequence
HKHLGLENPHH

SEQ ID NO: 8273 - protein, 11 aa, Artificial
  IGFBP-2 heparin binding domain-containing peptide sequence
KRHLGLENPHH

SEQ ID NO: 8274 - protein, 11 aa, Artificial
  IGFBP-2 heparin binding domain-containing peptide sequence
RRHLGLENPHH

SEQ ID NO: 8275 - protein, 11 aa, Artificial
  IGFBP-2 heparin binding domain-containing peptide sequence
HRHLGLENPHH

SEQ ID NO: 8276 - protein, 11 aa, Artificial
  IGFBP-2 heparin binding domain-containing peptide sequence
KHKLGLENPHH

SEQ ID NO: 8277 - protein, 11 aa, Artificial
  IGFBP-2 heparin binding domain-containing peptide sequence
RHKLGLENPHH

SEQ ID NO: 8278 - protein, 11 aa, Artificial
  IGFBP-2 heparin binding domain-containing peptide sequence
HHKLGLENPHH

SEQ ID NO: 8279 - protein, 11 aa, Artificial
  IGFBP-2 heparin binding domain-containing peptide sequence
KKKLGLENPHH

SEQ ID NO: 8280 - protein, 11 aa, Artificial
  IGFBP-2 heparin binding domain-containing peptide sequence
RKKLGLENPHH

SEQ ID NO: 8281 - protein, 11 aa, Artificial
  IGFBP-2 heparin binding domain-containing peptide sequence
HKKLGLENPHH

SEQ ID NO: 8282 - protein, 11 aa, Artificial
  IGFBP-2 heparin binding domain-containing peptide sequence
KRKLGLENPHH

SEQ ID NO: 8283 - protein, 11 aa, Artificial
  IGFBP-2 heparin binding domain-containing peptide sequence
RRKLGLENPHH

SEQ ID NO: 8284 - protein, 11 aa, Artificial
  IGFBP-2 heparin binding domain-containing peptide sequence
HRKLGLENPHH

SEQ ID NO: 8285 - protein, 11 aa, Artificial
  IGFBP-2 heparin binding domain-containing peptide sequence
KHRLGLENPHH

SEQ ID NO: 8286 - protein, 11 aa, Artificial
  IGFBP-2 heparin binding domain-containing peptide sequence
RHRLGLENPHH

SEQ ID NO: 8287 - protein, 11 aa, Artificial
  IGFBP-2 heparin binding domain-containing peptide sequence
HHRLGLENPHH

SEQ ID NO: 8288 - protein, 11 aa, Artificial
  IGFBP-2 heparin binding domain-containing peptide sequence
KKRLGLENPHH

SEQ ID NO: 8289 - protein, 11 aa, Artificial
  IGFBP-2 heparin binding domain-containing peptide sequence
RKRLGLENPHH

SEQ ID NO: 8290 - protein, 11 aa, Artificial
  IGFBP-2 heparin binding domain-containing peptide sequence
HKRLGLENPHH

SEQ ID NO: 8291 - protein, 11 aa, Artificial
  IGFBP-2 heparin binding domain-containing peptide sequence
KRRLGLENPHH

SEQ ID NO: 8292 - protein, 11 aa, Artificial
  IGFBP-2 heparin binding domain-containing peptide sequence
RRRLGLENPHH

SEQ ID NO: 8293 - protein, 11 aa, Artificial
  IGFBP-2 heparin binding domain-containing peptide sequence
HRRLGLENPHH

SEQ ID NO: 8294 - protein, 11 aa, Artificial
  IGFBP-2 heparin binding domain-containing peptide sequence
KHHIGLENPHH

SEQ ID NO: 8295 - protein, 11 aa, Artificial
  IGFBP-2 heparin binding domain-containing peptide sequence
RHHIGLENPHH

SEQ ID NO: 8296 - protein, 11 aa, Artificial
  IGFBP-2 heparin binding domain-containing peptide sequence
HHHIGLENPHH

SEQ ID NO: 8297 - protein, 11 aa, Artificial
  IGFBP-2 heparin binding domain-containing peptide sequence
KKHIGLENPHH

SEQ ID NO: 8298 - protein, 11 aa, Artificial
  IGFBP-2 heparin binding domain-containing peptide sequence
RKHIGLENPHH

SEQ ID NO: 8299 - protein, 11 aa, Artificial
  IGFBP-2 heparin binding domain-containing peptide sequence
HKHIGLENPHH

SEQ ID NO: 8300 - protein, 11 aa, Artificial
  IGFBP-2 heparin binding domain-containing peptide sequence
KRHIGLENPHH

SEQ ID NO: 8301 - protein, 11 aa, Artificial
  IGFBP-2 heparin binding domain-containing peptide sequence
RRHIGLENPHH

SEQ ID NO: 8302 - protein, 11 aa, Artificial
  IGFBP-2 heparin binding domain-containing peptide sequence
HRHIGLENPHH

SEQ ID NO: 8303 - protein, 11 aa, Artificial
  IGFBP-2 heparin binding domain-containing peptide sequence
KHKIGLENPHH

SEQ ID NO: 8304 - protein, 11 aa, Artificial
  IGFBP-2 heparin binding domain-containing peptide sequence
RHKIGLENPHH

SEQ ID NO: 8305 - protein, 11 aa, Artificial
  IGFBP-2 heparin binding domain-containing peptide sequence
HHKIGLENPHH

SEQ ID NO: 8306 - protein, 11 aa, Artificial
  IGFBP-2 heparin binding domain-containing peptide sequence
KKKIGLENPHH

SEQ ID NO: 8307 - protein, 11 aa, Artificial
  IGFBP-2 heparin binding domain-containing peptide sequence
RKKIGLENPHH

SEQ ID NO: 8308 - protein, 11 aa, Artificial
  IGFBP-2 heparin binding domain-containing peptide sequence
HKKIGLENPHH

SEQ ID NO: 8309 - protein, 11 aa, Artificial
  IGFBP-2 heparin binding domain-containing peptide sequence
KRKIGLENPHH

SEQ ID NO: 8310 - protein, 11 aa, Artificial
  IGFBP-2 heparin binding domain-containing peptide sequence
RRKIGLENPHH

SEQ ID NO: 8311 - protein, 11 aa, Artificial
  IGFBP-2 heparin binding domain-containing peptide sequence
HRKIGLENPHH

SEQ ID NO: 8312 - protein, 11 aa, Artificial
  IGFBP-2 heparin binding domain-containing peptide sequence
KHRIGLENPHH

SEQ ID NO: 8313 - protein, 11 aa, Artificial
  IGFBP-2 heparin binding domain-containing peptide sequence
RHRIGLENPHH

SEQ ID NO: 8314 - protein, 11 aa, Artificial
  IGFBP-2 heparin binding domain-containing peptide sequence
HHRIGLENPHH

SEQ ID NO: 8315 - protein, 11 aa, Artificial
  IGFBP-2 heparin binding domain-containing peptide sequence
KKRIGLENPHH

SEQ ID NO: 8316 - protein, 11 aa, Artificial
  IGFBP-2 heparin binding domain-containing peptide sequence
RKRIGLENPHH

SEQ ID NO: 8317 - protein, 11 aa, Artificial
  IGFBP-2 heparin binding domain-containing peptide sequence
HKRIGLENPHH

SEQ ID NO: 8318 - protein, 11 aa, Artificial
  IGFBP-2 heparin binding domain-containing peptide sequence
KRRIGLENPHH

SEQ ID NO: 8319 - protein, 11 aa, Artificial
  IGFBP-2 heparin binding domain-containing peptide sequence
RRRIGLENPHH

SEQ ID NO: 8320 - protein, 11 aa, Artificial
  IGFBP-2 heparin binding domain-containing peptide sequence
HRRIGLENPHH

SEQ ID NO: 8321 - protein, 11 aa, Artificial
  IGFBP-2 heparin binding domain-containing peptide sequence
KHHVGLENPHH

SEQ ID NO: 8322 - protein, 11 aa, Artificial
  IGFBP-2 heparin binding domain-containing peptide sequence
RHHVGLENPHH

SEQ ID NO: 8323 - protein, 11 aa, Artificial
  IGFBP-2 heparin binding domain-containing peptide sequence
HHHVGLENPHH

SEQ ID NO: 8324 - protein, 11 aa, Artificial
  IGFBP-2 heparin binding domain-containing peptide sequence
KKHVGLENPHH

SEQ ID NO: 8325 - protein, 11 aa, Artificial
  IGFBP-2 heparin binding domain-containing peptide sequence
RKHVGLENPHH

SEQ ID NO: 8326 - protein, 11 aa, Artificial
  IGFBP-2 heparin binding domain-containing peptide sequence
HKHVGLENPHH

SEQ ID NO: 8327 - protein, 11 aa, Artificial
  IGFBP-2 heparin binding domain-containing peptide sequence
KRHVGLENPHH

SEQ ID NO: 8328 - protein, 11 aa, Artificial
  IGFBP-2 heparin binding domain-containing peptide sequence
RRHVGLENPHH

SEQ ID NO: 8329 - protein, 11 aa, Artificial
  IGFBP-2 heparin binding domain-containing peptide sequence
HRHVGLENPHH

SEQ ID NO: 8330 - protein, 11 aa, Artificial
  IGFBP-2 heparin binding domain-containing peptide sequence
KHKVGLENPHH

SEQ ID NO: 8331 - protein, 11 aa, Artificial
  IGFBP-2 heparin binding domain-containing peptide sequence
RHKVGLENPHH

SEQ ID NO: 8332 - protein, 11 aa, Artificial
  IGFBP-2 heparin binding domain-containing peptide sequence
HHKVGLENPHH

SEQ ID NO: 8333 - protein, 11 aa, Artificial
  IGFBP-2 heparin binding domain-containing peptide sequence
KKKVGLENPHH

SEQ ID NO: 8334 - protein, 11 aa, Artificial
  IGFBP-2 heparin binding domain-containing peptide sequence
RKKVGLENPHH

SEQ ID NO: 8335 - protein, 11 aa, Artificial
  IGFBP-2 heparin binding domain-containing peptide sequence
HKKVGLENPHH

SEQ ID NO: 8336 - protein, 11 aa, Artificial
  IGFBP-2 heparin binding domain-containing peptide sequence
KRKVGLENPHH

SEQ ID NO: 8337 - protein, 11 aa, Artificial
  IGFBP-2 heparin binding domain-containing peptide sequence
RRKVGLENPHH

SEQ ID NO: 8338 - protein, 11 aa, Artificial
  IGFBP-2 heparin binding domain-containing peptide sequence
HRKVGLENPHH

SEQ ID NO: 8339 - protein, 11 aa, Artificial
  IGFBP-2 heparin binding domain-containing peptide sequence
KHRVGLENPHH

SEQ ID NO: 8340 - protein, 11 aa, Artificial
  IGFBP-2 heparin binding domain-containing peptide sequence
RHRVGLENPHH

SEQ ID NO: 8341 - protein, 11 aa, Artificial
  IGFBP-2 heparin binding domain-containing peptide sequence
HHRVGLENPHH

SEQ ID NO: 8342 - protein, 11 aa, Artificial
  IGFBP-2 heparin binding domain-containing peptide sequence
KKRVGLENPHH

SEQ ID NO: 8343 - protein, 11 aa, Artificial
  IGFBP-2 heparin binding domain-containing peptide sequence
RKRVGLENPHH

SEQ ID NO: 8344 - protein, 11 aa, Artificial
  IGFBP-2 heparin binding domain-containing peptide sequence
HKRVGLENPHH

SEQ ID NO: 8345 - protein, 11 aa, Artificial
  IGFBP-2 heparin binding domain-containing peptide sequence
KRRVGLENPHH

SEQ ID NO: 8346 - protein, 11 aa, Artificial
  IGFBP-2 heparin binding domain-containing peptide sequence
RRRVGLENPHH

SEQ ID NO: 8347 - protein, 11 aa, Artificial
  IGFBP-2 heparin binding domain-containing peptide sequence
HRRVGLENPHH

SEQ ID NO: 8348 - protein, 11 aa, Artificial
  IGFBP-2 heparin binding domain-containing peptide sequence
KHHLGIENPHH

SEQ ID NO: 8349 - protein, 11 aa, Artificial
  IGFBP-2 heparin binding domain-containing peptide sequence
RHHLGIENPHH

SEQ ID NO: 8350 - protein, 11 aa, Artificial
  IGFBP-2 heparin binding domain-containing peptide sequence
HHHLGIENPHH

SEQ ID NO: 8351 - protein, 11 aa, Artificial
  IGFBP-2 heparin binding domain-containing peptide sequence
KKHLGIENPHH

SEQ ID NO: 8352 - protein, 11 aa, Artificial
  IGFBP-2 heparin binding domain-containing peptide sequence
RKHLGIENPHH

SEQ ID NO: 8353 - protein, 11 aa, Artificial
  IGFBP-2 heparin binding domain-containing peptide sequence
HKHLGIENPHH

SEQ ID NO: 8354 - protein, 11 aa, Artificial
  IGFBP-2 heparin binding domain-containing peptide sequence
KRHLGIENPHH

SEQ ID NO: 8355 - protein, 11 aa, Artificial
  IGFBP-2 heparin binding domain-containing peptide sequence
RRHLGIENPHH

SEQ ID NO: 8356 - protein, 11 aa, Artificial
  IGFBP-2 heparin binding domain-containing peptide sequence
HRHLGIENPHH

SEQ ID NO: 8357 - protein, 11 aa, Artificial
  IGFBP-2 heparin binding domain-containing peptide sequence
KHKLGIENPHH

SEQ ID NO: 8358 - protein, 11 aa, Artificial
  IGFBP-2 heparin binding domain-containing peptide sequence
RHKLGIENPHH

SEQ ID NO: 8359 - protein, 11 aa, Artificial
  IGFBP-2 heparin binding domain-containing peptide sequence
HHKLGIENPHH

SEQ ID NO: 8360 - protein, 11 aa, Artificial
  IGFBP-2 heparin binding domain-containing peptide sequence
KKKLGIENPHH

SEQ ID NO: 8361 - protein, 11 aa, Artificial
  IGFBP-2 heparin binding domain-containing peptide sequence
RKKLGIENPHH

SEQ ID NO: 8362 - protein, 11 aa, Artificial
  IGFBP-2 heparin binding domain-containing peptide sequence
HKKLGIENPHH

SEQ ID NO: 8363 - protein, 11 aa, Artificial
  IGFBP-2 heparin binding domain-containing peptide sequence
KRKLGIENPHH

SEQ ID NO: 8364 - protein, 11 aa, Artificial
  IGFBP-2 heparin binding domain-containing peptide sequence
RRKLGIENPHH

SEQ ID NO: 8365 - protein, 11 aa, Artificial
  IGFBP-2 heparin binding domain-containing peptide sequence
HRKLGIENPHH

SEQ ID NO: 8366 - protein, 11 aa, Artificial
  IGFBP-2 heparin binding domain-containing peptide sequence
KHRLGIENPHH

SEQ ID NO: 8367 - protein, 11 aa, Artificial
  IGFBP-2 heparin binding domain-containing peptide sequence
RHRLGIENPHH

SEQ ID NO: 8368 - protein, 11 aa, Artificial
  IGFBP-2 heparin binding domain-containing peptide sequence
HHRLGIENPHH

SEQ ID NO: 8369 - protein, 11 aa, Artificial
  IGFBP-2 heparin binding domain-containing peptide sequence
KKRLGIENPHH

SEQ ID NO: 8370 - protein, 11 aa, Artificial
  IGFBP-2 heparin binding domain-containing peptide sequence
RKRLGIENPHH

SEQ ID NO: 8371 - protein, 11 aa, Artificial
  IGFBP-2 heparin binding domain-containing peptide sequence
HKRLGIENPHH

SEQ ID NO: 8372 - protein, 11 aa, Artificial
  IGFBP-2 heparin binding domain-containing peptide sequence
KRRLGIENPHH

SEQ ID NO: 8373 - protein, 11 aa, Artificial
  IGFBP-2 heparin binding domain-containing peptide sequence
RRRLGIENPHH

SEQ ID NO: 8374 - protein, 11 aa, Artificial
  IGFBP-2 heparin binding domain-containing peptide sequence
HRRLGIENPHH

SEQ ID NO: 8375 - protein, 11 aa, Artificial
  IGFBP-2 heparin binding domain-containing peptide sequence
KHHIGIENPHH

SEQ ID NO: 8376 - protein, 11 aa, Artificial
  IGFBP-2 heparin binding domain-containing peptide sequence
RHHIGIENPHH

SEQ ID NO: 8377 - protein, 11 aa, Artificial
  IGFBP-2 heparin binding domain-containing peptide sequence
HHHIGIENPHH

SEQ ID NO: 8378 - protein, 11 aa, Artificial
  IGFBP-2 heparin binding domain-containing peptide sequence
KKHIGIENPHH

SEQ ID NO: 8379 - protein, 11 aa, Artificial
  IGFBP-2 heparin binding domain-containing peptide sequence
RKHIGIENPHH

SEQ ID NO: 8380 - protein, 11 aa, Artificial
  IGFBP-2 heparin binding domain-containing peptide sequence
HKHIGIENPHH

SEQ ID NO: 8381 - protein, 11 aa, Artificial
  IGFBP-2 heparin binding domain-containing peptide sequence
KRHIGIENPHH

SEQ ID NO: 8382 - protein, 11 aa, Artificial
  IGFBP-2 heparin binding domain-containing peptide sequence
RRHIGIENPHH

SEQ ID NO: 8383 - protein, 11 aa, Artificial
  IGFBP-2 heparin binding domain-containing peptide sequence
HRHIGIENPHH

SEQ ID NO: 8384 - protein, 11 aa, Artificial
  IGFBP-2 heparin binding domain-containing peptide sequence
KHKIGIENPHH

SEQ ID NO: 8385 - protein, 11 aa, Artificial
  IGFBP-2 heparin binding domain-containing peptide sequence
RHKIGIENPHH

SEQ ID NO: 8386 - protein, 11 aa, Artificial
  IGFBP-2 heparin binding domain-containing peptide sequence
HHKIGIENPHH

SEQ ID NO: 8387 - protein, 11 aa, Artificial
  IGFBP-2 heparin binding domain-containing peptide sequence
KKKIGIENPHH

SEQ ID NO: 8388 - protein, 11 aa, Artificial
  IGFBP-2 heparin binding domain-containing peptide sequence
RKKIGIENPHH

SEQ ID NO: 8389 - protein, 11 aa, Artificial
  IGFBP-2 heparin binding domain-containing peptide sequence
HKKIGIENPHH

SEQ ID NO: 8390 - protein, 11 aa, Artificial
  IGFBP-2 heparin binding domain-containing peptide sequence
KRKIGIENPHH

SEQ ID NO: 8391 - protein, 11 aa, Artificial
  IGFBP-2 heparin binding domain-containing peptide sequence
RRKIGIENPHH

SEQ ID NO: 8392 - protein, 11 aa, Artificial
  IGFBP-2 heparin binding domain-containing peptide sequence
HRKIGIENPHH

SEQ ID NO: 8393 - protein, 11 aa, Artificial
  IGFBP-2 heparin binding domain-containing peptide sequence
KHRIGIENPHH

SEQ ID NO: 8394 - protein, 11 aa, Artificial
  IGFBP-2 heparin binding domain-containing peptide sequence
RHRIGIENPHH

SEQ ID NO: 8395 - protein, 11 aa, Artificial
  IGFBP-2 heparin binding domain-containing peptide sequence
HHRIGIENPHH

SEQ ID NO: 8396 - protein, 11 aa, Artificial
  IGFBP-2 heparin binding domain-containing peptide sequence
KKRIGIENPHH

SEQ ID NO: 8397 - protein, 11 aa, Artificial
  IGFBP-2 heparin binding domain-containing peptide sequence
RKRIGIENPHH

SEQ ID NO: 8398 - protein, 11 aa, Artificial
  IGFBP-2 heparin binding domain-containing peptide sequence
HKRIGIENPHH

SEQ ID NO: 8399 - protein, 11 aa, Artificial
  IGFBP-2 heparin binding domain-containing peptide sequence
KRRIGIENPHH

SEQ ID NO: 8400 - protein, 11 aa, Artificial
  IGFBP-2 heparin binding domain-containing peptide sequence
RRRIGIENPHH

SEQ ID NO: 8401 - protein, 11 aa, Artificial
  IGFBP-2 heparin binding domain-containing peptide sequence
HRRIGIENPHH

SEQ ID NO: 8402 - protein, 11 aa, Artificial
  IGFBP-2 heparin binding domain-containing peptide sequence
KHHVGIENPHH

SEQ ID NO: 8403 - protein, 11 aa, Artificial
  IGFBP-2 heparin binding domain-containing peptide sequence
RHHVGIENPHH

SEQ ID NO: 8404 - protein, 11 aa, Artificial
  IGFBP-2 heparin binding domain-containing peptide sequence
HHHVGIENPHH

SEQ ID NO: 8405 - protein, 11 aa, Artificial
  IGFBP-2 heparin binding domain-containing peptide sequence
KKHVGIENPHH

SEQ ID NO: 8406 - protein, 11 aa, Artificial
  IGFBP-2 heparin binding domain-containing peptide sequence
RKHVGIENPHH

SEQ ID NO: 8407 - protein, 11 aa, Artificial
  IGFBP-2 heparin binding domain-containing peptide sequence
HKHVGIENPHH

SEQ ID NO: 8408 - protein, 11 aa, Artificial
  IGFBP-2 heparin binding domain-containing peptide sequence
KRHVGIENPHH

SEQ ID NO: 8409 - protein, 11 aa, Artificial
  IGFBP-2 heparin binding domain-containing peptide sequence
RRHVGIENPHH

SEQ ID NO: 8410 - protein, 11 aa, Artificial
  IGFBP-2 heparin binding domain-containing peptide sequence
HRHVGIENPHH

SEQ ID NO: 8411 - protein, 11 aa, Artificial
  IGFBP-2 heparin binding domain-containing peptide sequence
KHKVGIENPHH

SEQ ID NO: 8412 - protein, 11 aa, Artificial
  IGFBP-2 heparin binding domain-containing peptide sequence
RHKVGIENPHH

SEQ ID NO: 8413 - protein, 11 aa, Artificial
  IGFBP-2 heparin binding domain-containing peptide sequence
HHKVGIENPHH

SEQ ID NO: 8414 - protein, 11 aa, Artificial
  IGFBP-2 heparin binding domain-containing peptide sequence
KKKVGIENPHH

SEQ ID NO: 8415 - protein, 11 aa, Artificial
  IGFBP-2 heparin binding domain-containing peptide sequence
RKKVGIENPHH

SEQ ID NO: 8416 - protein, 11 aa, Artificial
  IGFBP-2 heparin binding domain-containing peptide sequence
HKKVGIENPHH

SEQ ID NO: 8417 - protein, 11 aa, Artificial
  IGFBP-2 heparin binding domain-containing peptide sequence
KRKVGIENPHH

SEQ ID NO: 8418 - protein, 11 aa, Artificial
  IGFBP-2 heparin binding domain-containing peptide sequence
RRKVGIENPHH

SEQ ID NO: 8419 - protein, 11 aa, Artificial
  IGFBP-2 heparin binding domain-containing peptide sequence
HRKVGIENPHH

SEQ ID NO: 8420 - protein, 11 aa, Artificial
  IGFBP-2 heparin binding domain-containing peptide sequence
KHRVGIENPHH

SEQ ID NO: 8421 - protein, 11 aa, Artificial
  IGFBP-2 heparin binding domain-containing peptide sequence
RHRVGIENPHH

SEQ ID NO: 8422 - protein, 11 aa, Artificial
  IGFBP-2 heparin binding domain-containing peptide sequence
HHRVGIENPHH

SEQ ID NO: 8423 - protein, 11 aa, Artificial
  IGFBP-2 heparin binding domain-containing peptide sequence
KKRVGIENPHH

SEQ ID NO: 8424 - protein, 11 aa, Artificial
  IGFBP-2 heparin binding domain-containing peptide sequence
RKRVGIENPHH

SEQ ID NO: 8425 - protein, 11 aa, Artificial
  IGFBP-2 heparin binding domain-containing peptide sequence
HKRVGIENPHH

SEQ ID NO: 8426 - protein, 11 aa, Artificial
  IGFBP-2 heparin binding domain-containing peptide sequence
KRRVGIENPHH

SEQ ID NO: 8427 - protein, 11 aa, Artificial
  IGFBP-2 heparin binding domain-containing peptide sequence
RRRVGIENPHH

SEQ ID NO: 8428 - protein, 11 aa, Artificial
  IGFBP-2 heparin binding domain-containing peptide sequence
HRRVGIENPHH

SEQ ID NO: 8429 - protein, 11 aa, Artificial
  IGFBP-2 heparin binding domain-containing peptide sequence
KHHLGVENPHH

SEQ ID NO: 8430 - protein, 11 aa, Artificial
  IGFBP-2 heparin binding domain-containing peptide sequence
RHHLGVENPHH

SEQ ID NO: 8431 - protein, 11 aa, Artificial
  IGFBP-2 heparin binding domain-containing peptide sequence
HHHLGVENPHH

SEQ ID NO: 8432 - protein, 11 aa, Artificial
  IGFBP-2 heparin binding domain-containing peptide sequence
KKHLGVENPHH

SEQ ID NO: 8433 - protein, 11 aa, Artificial
  IGFBP-2 heparin binding domain-containing peptide sequence
RKHLGVENPHH

SEQ ID NO: 8434 - protein, 11 aa, Artificial
  IGFBP-2 heparin binding domain-containing peptide sequence
HKHLGVENPHH

SEQ ID NO: 8435 - protein, 11 aa, Artificial
  IGFBP-2 heparin binding domain-containing peptide sequence
KRHLGVENPHH

SEQ ID NO: 8436 - protein, 11 aa, Artificial
  IGFBP-2 heparin binding domain-containing peptide sequence
RRHLGVENPHH

SEQ ID NO: 8437 - protein, 11 aa, Artificial
  IGFBP-2 heparin binding domain-containing peptide sequence
HRHLGVENPHH

SEQ ID NO: 8438 - protein, 11 aa, Artificial
  IGFBP-2 heparin binding domain-containing peptide sequence
KHKLGVENPHH

SEQ ID NO: 8439 - protein, 11 aa, Artificial
  IGFBP-2 heparin binding domain-containing peptide sequence
RHKLGVENPHH

SEQ ID NO: 8440 - protein, 11 aa, Artificial
  IGFBP-2 heparin binding domain-containing peptide sequence
HHKLGVENPHH

SEQ ID NO: 8441 - protein, 11 aa, Artificial
  IGFBP-2 heparin binding domain-containing peptide sequence
KKKLGVENPHH

SEQ ID NO: 8442 - protein, 11 aa, Artificial
  IGFBP-2 heparin binding domain-containing peptide sequence
RKKLGVENPHH

SEQ ID NO: 8443 - protein, 11 aa, Artificial
  IGFBP-2 heparin binding domain-containing peptide sequence
HKKLGVENPHH

SEQ ID NO: 8444 - protein, 11 aa, Artificial
  IGFBP-2 heparin binding domain-containing peptide sequence
KRKLGVENPHH

SEQ ID NO: 8445 - protein, 11 aa, Artificial
  IGFBP-2 heparin binding domain-containing peptide sequence
RRKLGVENPHH

SEQ ID NO: 8446 - protein, 11 aa, Artificial
  IGFBP-2 heparin binding domain-containing peptide sequence
HRKLGVENPHH

SEQ ID NO: 8447 - protein, 11 aa, Artificial
  IGFBP-2 heparin binding domain-containing peptide sequence
KHRLGVENPHH

SEQ ID NO: 8448 - protein, 11 aa, Artificial
  IGFBP-2 heparin binding domain-containing peptide sequence
RHRLGVENPHH

SEQ ID NO: 8449 - protein, 11 aa, Artificial
  IGFBP-2 heparin binding domain-containing peptide sequence
HHRLGVENPHH

SEQ ID NO: 8450 - protein, 11 aa, Artificial
  IGFBP-2 heparin binding domain-containing peptide sequence
KKRLGVENPHH

SEQ ID NO: 8451 - protein, 11 aa, Artificial
  IGFBP-2 heparin binding domain-containing peptide sequence
RKRLGVENPHH

SEQ ID NO: 8452 - protein, 11 aa, Artificial
  IGFBP-2 heparin binding domain-containing peptide sequence
HKRLGVENPHH

SEQ ID NO: 8453 - protein, 11 aa, Artificial
  IGFBP-2 heparin binding domain-containing peptide sequence
KRRLGVENPHH

SEQ ID NO: 8454 - protein, 11 aa, Artificial
  IGFBP-2 heparin binding domain-containing peptide sequence
RRRLGVENPHH

SEQ ID NO: 8455 - protein, 11 aa, Artificial
  IGFBP-2 heparin binding domain-containing peptide sequence
HRRLGVENPHH

SEQ ID NO: 8456 - protein, 11 aa, Artificial
  IGFBP-2 heparin binding domain-containing peptide sequence
KHHIGVENPHH

SEQ ID NO: 8457 - protein, 11 aa, Artificial
  IGFBP-2 heparin binding domain-containing peptide sequence
RHHIGVEEPHH

SEQ ID NO: 8458 - protein, 11 aa, Artificial
  IGFBP-2 heparin binding domain-containing peptide sequence
HHHIGVENPHH

SEQ ID NO: 8459 - protein, 11 aa, Artificial
  IGFBP-2 heparin binding domain-containing peptide sequence
KKHIGVENPHH

SEQ ID NO: 8460 - protein, 11 aa, Artificial
  IGFBP-2 heparin binding domain-containing peptide sequence
RKHIGVENPHH

SEQ ID NO: 8461 - protein, 11 aa, Artificial
  IGFBP-2 heparin binding domain-containing peptide sequence
HKHIGVENPHH

SEQ ID NO: 8462 - protein, 11 aa, Artificial
  IGFBP-2 heparin binding domain-containing peptide sequence
KRHIGVENPHH

SEQ ID NO: 8463 - protein, 11 aa, Artificial
  IGFBP-2 heparin binding domain-containing peptide sequence
RRHIGVENPHH

SEQ ID NO: 8464 - protein, 11 aa, Artificial
  IGFBP-2 heparin binding domain-containing peptide sequence
HRHIGVENPHH

SEQ ID NO: 8465 - protein, 11 aa, Artificial
  IGFBP-2 heparin binding domain-containing peptide sequence
KHKIGVENPHH

SEQ ID NO: 8466 - protein, 11 aa, Artificial
  IGFBP-2 heparin binding domain-containing peptide sequence
RHKIGVENPHH

SEQ ID NO: 8467 - protein, 11 aa, Artificial
  IGFBP-2 heparin binding domain-containing peptide sequence
HHKIGVENPHH

SEQ ID NO: 8468 - protein, 11 aa, Artificial
  IGFBP-2 heparin binding domain-containing peptide sequence
KKKIGVENPHH

SEQ ID NO: 8469 - protein, 11 aa, Artificial
  IGFBP-2 heparin binding domain-containing peptide sequence
RKKIGVENPHH

SEQ ID NO: 8470 - protein, 11 aa, Artificial
  IGFBP-2 heparin binding domain-containing peptide sequence
HKKIGVENPHH

SEQ ID NO: 8471 - protein, 11 aa, Artificial
  IGFBP-2 heparin binding domain-containing peptide sequence
KRKIGVENPHH

SEQ ID NO: 8472 - protein, 11 aa, Artificial
  IGFBP-2 heparin binding domain-containing peptide sequence
RRKIGVENPHH

SEQ ID NO: 8473 - protein, 11 aa, Artificial
  IGFBP-2 heparin binding domain-containing peptide sequence
HRKIGVENPHH

SEQ ID NO: 8474 - protein, 11 aa, Artificial
  IGFBP-2 heparin binding domain-containing peptide sequence
KHRIGVENPHH

SEQ ID NO: 8475 - protein, 11 aa, Artificial
  IGFBP-2 heparin binding domain-containing peptide sequence
RHRIGVENPHH

SEQ ID NO: 8476 - protein, 11 aa, Artificial
  IGFBP-2 heparin binding domain-containing peptide sequence
HHRIGVENPHH

SEQ ID NO: 8477 - protein, 11 aa, Artificial
  IGFBP-2 heparin binding domain-containing peptide sequence
KKRIGVENPHH

SEQ ID NO: 8478 - protein, 11 aa, Artificial
  IGFBP-2 heparin binding domain-containing peptide sequence
RKRIGVENPHH

SEQ ID NO: 8479 - protein, 11 aa, Artificial
  IGFBP-2 heparin binding domain-containing peptide sequence
HKRIGVENPHH

SEQ ID NO: 8480 - protein, 11 aa, Artificial
  IGFBP-2 heparin binding domain-containing peptide sequence
KRRIGVENPHH

SEQ ID NO: 8481 - protein, 11 aa, Artificial
  IGFBP-2 heparin binding domain-containing peptide sequence
RRRIGVENPHH

SEQ ID NO: 8482 - protein, 11 aa, Artificial
  IGFBP-2 heparin binding domain-containing peptide sequence
HRRIGVENPHH

SEQ ID NO: 8483 - protein, 11 aa, Artificial
  IGFBP-2 heparin binding domain-containing peptide sequence
KHHVGVENPHH

SEQ ID NO: 8484 - protein, 11 aa, Artificial
  IGFBP-2 heparin binding domain-containing peptide sequence
RHHVGVENPHH

SEQ ID NO: 8485 - protein, 11 aa, Artificial
  IGFBP-2 heparin binding domain-containing peptide sequence
HHHVGVENPHH

SEQ ID NO: 8486 - protein, 11 aa, Artificial
  IGFBP-2 heparin binding domain-containing peptide sequence
KKHVGVENPHH

SEQ ID NO: 8487 - protein, 11 aa, Artificial
  IGFBP-2 heparin binding domain-containing peptide sequence
RKHVGVENPHH

SEQ ID NO: 8488 - protein, 11 aa, Artificial
  IGFBP-2 heparin binding domain-containing peptide sequence
HKHVGVENPHH

SEQ ID NO: 8489 - protein, 11 aa, Artificial
  IGFBP-2 heparin binding domain-containing peptide sequence
KRHVGVENPHH

SEQ ID NO: 8490 - protein, 11 aa, Artificial
  IGFBP-2 heparin binding domain-containing peptide sequence
RRHVGVENPHH

SEQ ID NO: 8491 - protein, 11 aa, Artificial
  IGFBP-2 heparin binding domain-containing peptide sequence
HRHVGVENPHH

SEQ ID NO: 8492 - protein, 11 aa, Artificial
  IGFBP-2 heparin binding domain-containing peptide sequence
KHKVGVENPHH

SEQ ID NO: 8493 - protein, 11 aa, Artificial
  IGFBP-2 heparin binding domain-containing peptide sequence
RHKVGVENPHH

SEQ ID NO: 8494 - protein, 11 aa, Artificial
  IGFBP-2 heparin binding domain-containing peptide sequence
HHKVGVENPHH

SEQ ID NO: 8495 - protein, 11 aa, Artificial
  IGFBP-2 heparin binding domain-containing peptide sequence
KKKVGVENPHH

SEQ ID NO: 8496 - protein, 11 aa, Artificial
  IGFBP-2 heparin binding domain-containing peptide sequence
RKKVGVENPHH

SEQ ID NO: 8497 - protein, 11 aa, Artificial
  IGFBP-2 heparin binding domain-containing peptide sequence
HKKVGVENPHH

SEQ ID NO: 8498 - protein, 11 aa, Artificial
  IGFBP-2 heparin binding domain-containing peptide sequence
KRKVGVENPHH

SEQ ID NO: 8499 - protein, 11 aa, Artificial
  IGFBP-2 heparin binding domain-containing peptide sequence
RRKVGVEEPHH

SEQ ID NO: 8500 - protein, 11 aa, Artificial
  IGFBP-2 heparin binding domain-containing peptide sequence
HRKVGVENPHH

SEQ ID NO: 8501 - protein, 11 aa, Artificial
  IGFBP-2 heparin binding domain-containing peptide sequence
KHRVGVENPHH

SEQ ID NO: 8502 - protein, 11 aa, Artificial
  IGFBP-2 heparin binding domain-containing peptide sequence
RHRVGVENPHH

SEQ ID NO: 8503 - protein, 11 aa, Artificial
  IGFBP-2 heparin binding domain-containing peptide sequence
HHRVGVENPHH

SEQ ID NO: 8504 - protein, 11 aa, Artificial
  IGFBP-2 heparin binding domain-containing peptide sequence
KKRVGVENPHH

SEQ ID NO: 8505 - protein, 11 aa, Artificial
  IGFBP-2 heparin binding domain-containing peptide sequence
RKRVGVENPHH

SEQ ID NO: 8506 - protein, 11 aa, Artificial
  IGFBP-2 heparin binding domain-containing peptide sequence
HKRVGVENPHH

SEQ ID NO: 8507 - protein, 11 aa, Artificial
  IGFBP-2 heparin binding domain-containing peptide sequence
KRRVGVENPHH

SEQ ID NO: 8508 - protein, 11 aa, Artificial
  IGFBP-2 heparin binding domain-containing peptide sequence
RRRVGVENPHH

SEQ ID NO: 8509 - protein, 11 aa, Artificial
  IGFBP-2 heparin binding domain-containing peptide sequence
HRRVGVENPHH

SEQ ID NO: 8510 - protein, 11 aa, Artificial
  IGFBP-2 heparin binding domain-containing peptide sequence
KHHLGLNNPHH

SEQ ID NO: 8511 - protein, 11 aa, Artificial
  IGFBP-2 heparin binding domain-containing peptide sequence
RHHLGLNNPHH

SEQ ID NO: 8512 - protein, 11 aa, Artificial
  IGFBP-2 heparin binding domain-containing peptide sequence
HHHLGLNNPHH

SEQ ID NO: 8513 - protein, 11 aa, Artificial
  IGFBP-2 heparin binding domain-containing peptide sequence
KKHLGLNNPHH

SEQ ID NO: 8514 - protein, 11 aa, Artificial
  IGFBP-2 heparin binding domain-containing peptide sequence
RKHLGLNNPHH

SEQ ID NO: 8515 - protein, 11 aa, Artificial
  IGFBP-2 heparin binding domain-containing peptide sequence
HKHLGLNNPHH

SEQ ID NO: 8516 - protein, 11 aa, Artificial
  IGFBP-2 heparin binding domain-containing peptide sequence
KRHLGLNNPHH

SEQ ID NO: 8517 - protein, 11 aa, Artificial
  IGFBP-2 heparin binding domain-containing peptide sequence
RRHLGLNNPHH

SEQ ID NO: 8518 - protein, 11 aa, Artificial
  IGFBP-2 heparin binding domain-containing peptide sequence
HRHLGLNNPHH

SEQ ID NO: 8519 - protein, 11 aa, Artificial
  IGFBP-2 heparin binding domain-containing peptide sequence
KHKLGLNNPHH

SEQ ID NO: 8520 - protein, 11 aa, Artificial
  IGFBP-2 heparin binding domain-containing peptide sequence
RHKLGLNNPHH

SEQ ID NO: 8521 - protein, 11 aa, Artificial
  IGFBP-2 heparin binding domain-containing peptide sequence
HHKLGLNNPHH

SEQ ID NO: 8522 - protein, 11 aa, Artificial
  IGFBP-2 heparin binding domain-containing peptide sequence
KKKLGLNNPHH

SEQ ID NO: 8523 - protein, 11 aa, Artificial
  IGFBP-2 heparin binding domain-containing peptide sequence
RKKLGLNNPHH

SEQ ID NO: 8524 - protein, 11 aa, Artificial
  IGFBP-2 heparin binding domain-containing peptide sequence
HKKLGLNNPHH

SEQ ID NO: 8525 - protein, 11 aa, Artificial
  IGFBP-2 heparin binding domain-containing peptide sequence
KRKLGLNNPHH

SEQ ID NO: 8526 - protein, 11 aa, Artificial
  IGFBP-2 heparin binding domain-containing peptide sequence
RRKLGLNNPHH

SEQ ID NO: 8527 - protein, 11 aa, Artificial
  IGFBP-2 heparin binding domain-containing peptide sequence
HRKLGLNNPHH

SEQ ID NO: 8528 - protein, 11 aa, Artificial
  IGFBP-2 heparin binding domain-containing peptide sequence
KHRLGLNNPHH

SEQ ID NO: 8529 - protein, 11 aa, Artificial
  IGFBP-2 heparin binding domain-containing peptide sequence
RHRLGLNNPHH

SEQ ID NO: 8530 - protein, 11 aa, Artificial
  IGFBP-2 heparin binding domain-containing peptide sequence
HHRLGLNNPHH

SEQ ID NO: 8531 - protein, 11 aa, Artificial
  IGFBP-2 heparin binding domain-containing peptide sequence
KKRLGLNNPHH

SEQ ID NO: 8532 - protein, 11 aa, Artificial
  IGFBP-2 heparin binding domain-containing peptide sequence
RKRLGLNNPHH

SEQ ID NO: 8533 - protein, 11 aa, Artificial
  IGFBP-2 heparin binding domain-containing peptide sequence
HKRLGLNNPHH

SEQ ID NO: 8534 - protein, 11 aa, Artificial
  IGFBP-2 heparin binding domain-containing peptide sequence
KRRLGLNNPHH

SEQ ID NO: 8535 - protein, 11 aa, Artificial
  IGFBP-2 heparin binding domain-containing peptide sequence
RRRLGLNNPHH

SEQ ID NO: 8536 - protein, 11 aa, Artificial
  IGFBP-2 heparin binding domain-containing peptide sequence
HRRLGLNNPHH

SEQ ID NO: 8537 - protein, 11 aa, Artificial
  IGFBP-2 heparin binding domain-containing peptide sequence
KHHIGLNNPHH

SEQ ID NO: 8538 - protein, 11 aa, Artificial
  IGFBP-2 heparin binding domain-containing peptide sequence
RHHIGLNNPHH

SEQ ID NO: 8539 - protein, 11 aa, Artificial
  IGFBP-2 heparin binding domain-containing peptide sequence
HHHIGLNNPHH

SEQ ID NO: 8540 - protein, 11 aa, Artificial
  IGFBP-2 heparin binding domain-containing peptide sequence
KKHIGLNNPHH

SEQ ID NO: 8541 - protein, 11 aa, Artificial
  IGFBP-2 heparin binding domain-containing peptide sequence
RKHIGLNNPHH

SEQ ID NO: 8542 - protein, 11 aa, Artificial
  IGFBP-2 heparin binding domain-containing peptide sequence
HKHIGLNNPHH

SEQ ID NO: 8543 - protein, 11 aa, Artificial
  IGFBP-2 heparin binding domain-containing peptide sequence
KRHIGLNNPHH

SEQ ID NO: 8544 - protein, 11 aa, Artificial
  IGFBP-2 heparin binding domain-containing peptide sequence
RRHIGLNNPHH

SEQ ID NO: 8545 - protein, 11 aa, Artificial
  IGFBP-2 heparin binding domain-containing peptide sequence
HRHIGLNNPHH

SEQ ID NO: 8546 - protein, 11 aa, Artificial
  IGFBP-2 heparin binding domain-containing peptide sequence
KHKIGLNNPHH

SEQ ID NO: 8547 - protein, 11 aa, Artificial
  IGFBP-2 heparin binding domain-containing peptide sequence
RHKIGLNNPHH

SEQ ID NO: 8548 - protein, 11 aa, Artificial
  IGFBP-2 heparin binding domain-containing peptide sequence
HHKIGLNNPHH

SEQ ID NO: 8549 - protein, 11 aa, Artificial
  IGFBP-2 heparin binding domain-containing peptide sequence
KKKIGLNNPHH

SEQ ID NO: 8550 - protein, 11 aa, Artificial
  IGFBP-2 heparin binding domain-containing peptide sequence
RKKIGLNNPHH

SEQ ID NO: 8551 - protein, 11 aa, Artificial
  IGFBP-2 heparin binding domain-containing peptide sequence
HKKIGLNNPHH

SEQ ID NO: 8552 - protein, 11 aa, Artificial
  IGFBP-2 heparin binding domain-containing peptide sequence
KRKIGLNNPHH

SEQ ID NO: 8553 - protein, 11 aa, Artificial
  IGFBP-2 heparin binding domain-containing peptide sequence
RRKIGLNNPHH

SEQ ID NO: 8554 - protein, 11 aa, Artificial
  IGFBP-2 heparin binding domain-containing peptide sequence
HRKIGLNNPHH

SEQ ID NO: 8555 - protein, 11 aa, Artificial
  IGFBP-2 heparin binding domain-containing peptide sequence
KHRIGLNNPHH

SEQ ID NO: 8556 - protein, 11 aa, Artificial
  IGFBP-2 heparin binding domain-containing peptide sequence
RHRIGLNNPHH

SEQ ID NO: 8557 - protein, 11 aa, Artificial
  IGFBP-2 heparin binding domain-containing peptide sequence
HHRIGLNNPHH

SEQ ID NO: 8558 - protein, 11 aa, Artificial
  IGFBP-2 heparin binding domain-containing peptide sequence
KKRIGLNNPHH

SEQ ID NO: 8559 - protein, 11 aa, Artificial
  IGFBP-2 heparin binding domain-containing peptide sequence
RKRIGLNNPHH

SEQ ID NO: 8560 - protein, 11 aa, Artificial
  IGFBP-2 heparin binding domain-containing peptide sequence
HKRIGLNNPHH

SEQ ID NO: 8561 - protein, 11 aa, Artificial
  IGFBP-2 heparin binding domain-containing peptide sequence
KRRIGLNNPHH

SEQ ID NO: 8562 - protein, 11 aa, Artificial
  IGFBP-2 heparin binding domain-containing peptide sequence
RRRIGLNNPHH

SEQ ID NO: 8563 - protein, 11 aa, Artificial
  IGFBP-2 heparin binding domain-containing peptide sequence
HRRIGLNNPHH

SEQ ID NO: 8564 - protein, 11 aa, Artificial
  IGFBP-2 heparin binding domain-containing peptide sequence
KHHVGLNNPHH

SEQ ID NO: 8565 - protein, 11 aa, Artificial
  IGFBP-2 heparin binding domain-containing peptide sequence
RHHVGLNNPHH

SEQ ID NO: 8566 - protein, 11 aa, Artificial
  IGFBP-2 heparin binding domain-containing peptide sequence
HHHVGLNNPHH

SEQ ID NO: 8567 - protein, 11 aa, Artificial
  IGFBP-2 heparin binding domain-containing peptide sequence
KKHVGLNNPHH

SEQ ID NO: 8568 - protein, 11 aa, Artificial
  IGFBP-2 heparin binding domain-containing peptide sequence
RKHVGLNNPHH

SEQ ID NO: 8569 - protein, 11 aa, Artificial
  IGFBP-2 heparin binding domain-containing peptide sequence
HKHVGLNNPHH

SEQ ID NO: 8570 - protein, 11 aa, Artificial
  IGFBP-2 heparin binding domain-containing peptide sequence
KRHVGLNNPHH

SEQ ID NO: 8571 - protein, 11 aa, Artificial
  IGFBP-2 heparin binding domain-containing peptide sequence
RRHVGLNNPHH

SEQ ID NO: 8572 - protein, 11 aa, Artificial
  IGFBP-2 heparin binding domain-containing peptide sequence
HRHVGLNNPHH

SEQ ID NO: 8573 - protein, 11 aa, Artificial
  IGFBP-2 heparin binding domain-containing peptide sequence
KHKVGLNNPHH

SEQ ID NO: 8574 - protein, 11 aa, Artificial
  IGFBP-2 heparin binding domain-containing peptide sequence
RHKVGLNNPHH

SEQ ID NO: 8575 - protein, 11 aa, Artificial
  IGFBP-2 heparin binding domain-containing peptide sequence
HHKVGLNNPHH

SEQ ID NO: 8576 - protein, 11 aa, Artificial
  IGFBP-2 heparin binding domain-containing peptide sequence
KKKVGLNNPHH

SEQ ID NO: 8577 - protein, 11 aa, Artificial
  IGFBP-2 heparin binding domain-containing peptide sequence
RKKVGLNNPHH

SEQ ID NO: 8578 - protein, 11 aa, Artificial
  IGFBP-2 heparin binding domain-containing peptide sequence
HKKVGLNNPHH

SEQ ID NO: 8579 - protein, 11 aa, Artificial
  IGFBP-2 heparin binding domain-containing peptide sequence
KRKVGLNNPHH

SEQ ID NO: 8580 - protein, 11 aa, Artificial
  IGFBP-2 heparin binding domain-containing peptide sequence
RRKVGLNNPHH

SEQ ID NO: 8581 - protein, 11 aa, Artificial
  IGFBP-2 heparin binding domain-containing peptide sequence
HRKVGLNNPHH

SEQ ID NO: 8582 - protein, 11 aa, Artificial
  IGFBP-2 heparin binding domain-containing peptide sequence
KHRVGLNNPHH

SEQ ID NO: 8583 - protein, 11 aa, Artificial
  IGFBP-2 heparin binding domain-containing peptide sequence
RHRVGLNNPHH

SEQ ID NO: 8584 - protein, 11 aa, Artificial
  IGFBP-2 heparin binding domain-containing peptide sequence
HHRVGLNNPHH

SEQ ID NO: 8585 - protein, 11 aa, Artificial
  IGFBP-2 heparin binding domain-containing peptide sequence
KKRVGLNNPHH

SEQ ID NO: 8586 - protein, 11 aa, Artificial
  IGFBP-2 heparin binding domain-containing peptide sequence
RKRVGLNNPHH

SEQ ID NO: 8587 - protein, 11 aa, Artificial
  IGFBP-2 heparin binding domain-containing peptide sequence
HKRVGLNNPHH

SEQ ID NO: 8588 - protein, 11 aa, Artificial
  IGFBP-2 heparin binding domain-containing peptide sequence
KRRVGLNNPHH

SEQ ID NO: 8589 - protein, 11 aa, Artificial
  IGFBP-2 heparin binding domain-containing peptide sequence
RRRVGLNNPHH

SEQ ID NO: 8590 - protein, 11 aa, Artificial
  IGFBP-2 heparin binding domain-containing peptide sequence
HRRVGLNNPHH

SEQ ID NO: 8591 - protein, 11 aa, Artificial
  IGFBP-2 heparin binding domain-containing peptide sequence
KHHLGINNPHH

SEQ ID NO: 8592 - protein, 11 aa, Artificial
  IGFBP-2 heparin binding domain-containing peptide sequence
RHHLGINNPHH

SEQ ID NO: 8593 - protein, 11 aa, Artificial
  IGFBP-2 heparin binding domain-containing peptide sequence
HHHLGINNPHH

SEQ ID NO: 8594 - protein, 11 aa, Artificial
  IGFBP-2 heparin binding domain-containing peptide sequence
KKHLGINNPHH

SEQ ID NO: 8595 - protein, 11 aa, Artificial
  IGFBP-2 heparin binding domain-containing peptide sequence
RKHLGINNPHH

SEQ ID NO: 8596 - protein, 11 aa, Artificial
  IGFBP-2 heparin binding domain-containing peptide sequence
HKHLGINNPHH

SEQ ID NO: 8597 - protein, 11 aa, Artificial
  IGFBP-2 heparin binding domain-containing peptide sequence
KRHLGINNPHH

SEQ ID NO: 8598 - protein, 11 aa, Artificial
  IGFBP-2 heparin binding domain-containing peptide sequence
RRHLGINNPHH

SEQ ID NO: 8599 - protein, 11 aa, Artificial
  IGFBP-2 heparin binding domain-containing peptide sequence
HRHLGINNPHH

SEQ ID NO: 8600 - protein, 11 aa, Artificial
  IGFBP-2 heparin binding domain-containing peptide sequence
KHKLGINNPHH

SEQ ID NO: 8601 - protein, 11 aa, Artificial
  IGFBP-2 heparin binding domain-containing peptide sequence
RHKLGINNPHH

SEQ ID NO: 8602 - protein, 11 aa, Artificial
  IGFBP-2 heparin binding domain-containing peptide sequence
HHKLGINNPHH

SEQ ID NO: 8603 - protein, 11 aa, Artificial
  IGFBP-2 heparin binding domain-containing peptide sequence
KKKLGINNPHH

SEQ ID NO: 8604 - protein, 11 aa, Artificial
  IGFBP-2 heparin binding domain-containing peptide sequence
RKKLGINNPHH

SEQ ID NO: 8605 - protein, 11 aa, Artificial
  IGFBP-2 heparin binding domain-containing peptide sequence
HKKLGINNPHH

SEQ ID NO: 8606 - protein, 11 aa, Artificial
  IGFBP-2 heparin binding domain-containing peptide sequence
KRKLGINNPHH

SEQ ID NO: 8607 - protein, 11 aa, Artificial
  IGFBP-2 heparin binding domain-containing peptide sequence
RRKLGINNPHH

SEQ ID NO: 8608 - protein, 11 aa, Artificial
  IGFBP-2 heparin binding domain-containing peptide sequence
HRKLGINNPHH

SEQ ID NO: 8609 - protein, 11 aa, Artificial
  IGFBP-2 heparin binding domain-containing peptide sequence
KHRLGINNPHH

SEQ ID NO: 8610 - protein, 11 aa, Artificial
  IGFBP-2 heparin binding domain-containing peptide sequence
RHRLGINNPHH

SEQ ID NO: 8611 - protein, 11 aa, Artificial
  IGFBP-2 heparin binding domain-containing peptide sequence
HHRLGINNPHH

SEQ ID NO: 8612 - protein, 11 aa, Artificial
  IGFBP-2 heparin binding domain-containing peptide sequence
KKRLGINNPHH

SEQ ID NO: 8613 - protein, 11 aa, Artificial
  IGFBP-2 heparin binding domain-containing peptide sequence
RKRLGINNPHH

SEQ ID NO: 8614 - protein, 11 aa, Artificial
  IGFBP-2 heparin binding domain-containing peptide sequence
HKRLGINNPHH

SEQ ID NO: 8615 - protein, 11 aa, Artificial
  IGFBP-2 heparin binding domain-containing peptide sequence
KRRLGINNPHH

SEQ ID NO: 8616 - protein, 11 aa, Artificial
  IGFBP-2 heparin binding domain-containing peptide sequence
RRRLGINNPHH

SEQ ID NO: 8617 - protein, 11 aa, Artificial
  IGFBP-2 heparin binding domain-containing peptide sequence
HRRLGINNPHH

SEQ ID NO: 8618 - protein, 11 aa, Artificial
  IGFBP-2 heparin binding domain-containing peptide sequence
KHHIGIENPHH

SEQ ID NO: 8619 - protein, 11 aa, Artificial
  IGFBP-2 heparin binding domain-containing peptide sequence
RHHIGINNPHH

SEQ ID NO: 8620 - protein, 11 aa, Artificial
  IGFBP-2 heparin binding domain-containing peptide sequence
HHHIGINNPHH

SEQ ID NO: 8621 - protein, 11 aa, Artificial
  IGFBP-2 heparin binding domain-containing peptide sequence
KKHIGINNPHH

SEQ ID NO: 8622 - protein, 11 aa, Artificial
  IGFBP-2 heparin binding domain-containing peptide sequence
RKHIGINNPHH

SEQ ID NO: 8623 - protein, 11 aa, Artificial
  IGFBP-2 heparin binding domain-containing peptide sequence
HKHIGINNPHH

SEQ ID NO: 8624 - protein, 11 aa, Artificial
  IGFBP-2 heparin binding domain-containing peptide sequence
KRHIGINNPHH

SEQ ID NO: 8625 - protein, 11 aa, Artificial
  IGFBP-2 heparin binding domain-containing peptide sequence
RRHIGINNPHH

SEQ ID NO: 8626 - protein, 11 aa, Artificial
  IGFBP-2 heparin binding domain-containing peptide sequence
HRHIGINNPHH

SEQ ID NO: 8627 - protein, 11 aa, Artificial
  IGFBP-2 heparin binding domain-containing peptide sequence
KHKIGINNPHH

SEQ ID NO: 8628 - protein, 11 aa, Artificial
  IGFBP-2 heparin binding domain-containing peptide sequence
RHKIGINNPHH

SEQ ID NO: 8629 - protein, 11 aa, Artificial
  IGFBP-2 heparin binding domain-containing peptide sequence
HHKIGINNPHH

SEQ ID NO: 8630 - protein, 11 aa, Artificial
  IGFBP-2 heparin binding domain-containing peptide sequence
KKKIGINNPHH

SEQ ID NO: 8631 - protein, 11 aa, Artificial
  IGFBP-2 heparin binding domain-containing peptide sequence
RKKIGINNPHH

SEQ ID NO: 8632 - protein, 11 aa, Artificial
  IGFBP-2 heparin binding domain-containing peptide sequence
HKKIGINNPHH

SEQ ID NO: 8633 - protein, 11 aa, Artificial
  IGFBP-2 heparin binding domain-containing peptide sequence
KRKIGINNPHH

SEQ ID NO: 8634 - protein, 11 aa, Artificial
  IGFBP-2 heparin binding domain-containing peptide sequence
RRKIGINNPHH

SEQ ID NO: 8635 - protein, 11 aa, Artificial
  IGFBP-2 heparin binding domain-containing peptide sequence
HRKIGINNPHH

SEQ ID NO: 8636 - protein, 11 aa, Artificial
  IGFBP-2 heparin binding domain-containing peptide sequence
KHRIGINNPHH

SEQ ID NO: 8637 - protein, 11 aa, Artificial
  IGFBP-2 heparin binding domain-containing peptide sequence
RHRIGINNPHH

SEQ ID NO: 8638 - protein, 11 aa, Artificial
  IGFBP-2 heparin binding domain-containing peptide sequence
HHRIGINNPHH

SEQ ID NO: 8639 - protein, 11 aa, Artificial
  IGFBP-2 heparin binding domain-containing peptide sequence
KKRIGINNPHH

SEQ ID NO: 8640 - protein, 11 aa, Artificial
  IGFBP-2 heparin binding domain-containing peptide sequence
RKRIGINNPHH

SEQ ID NO: 8641 - protein, 11 aa, Artificial
  IGFBP-2 heparin binding domain-containing peptide sequence
HKRIGINNPHH

SEQ ID NO: 8642 - protein, 11 aa, Artificial
  IGFBP-2 heparin binding domain-containing peptide sequence
KRRIGINNPHH

SEQ ID NO: 8643 - protein, 11 aa, Artificial
  IGFBP-2 heparin binding domain-containing peptide sequence
RRRIGINNPHH

SEQ ID NO: 8644 - protein, 11 aa, Artificial
  IGFBP-2 heparin binding domain-containing peptide sequence
HRRIGINNPHH

SEQ ID NO: 8645 - protein, 11 aa, Artificial
  IGFBP-2 heparin binding domain-containing peptide sequence
KHHVGINNPHH

SEQ ID NO: 8646 - protein, 11 aa, Artificial
  IGFBP-2 heparin binding domain-containing peptide sequence
RHHVGINNPHH

SEQ ID NO: 8647 - protein, 11 aa, Artificial
  IGFBP-2 heparin binding domain-containing peptide sequence
HHHVGINNPHH

SEQ ID NO: 8648 - protein, 11 aa, Artificial
  IGFBP-2 heparin binding domain-containing peptide sequence
KKHVGINNPHH

SEQ ID NO: 8649 - protein, 11 aa, Artificial
  IGFBP-2 heparin binding domain-containing peptide sequence
RKHVGINNPHH

SEQ ID NO: 8650 - protein, 11 aa, Artificial
  IGFBP-2 heparin binding domain-containing peptide sequence
HKHVGINNPHH

SEQ ID NO: 8651 - protein, 11 aa, Artificial
  IGFBP-2 heparin binding domain-containing peptide sequence
KRHVGINNPHH

SEQ ID NO: 8652 - protein, 11 aa, Artificial
  IGFBP-2 heparin binding domain-containing peptide sequence
RRHVGINNPHH

SEQ ID NO: 8653 - protein, 11 aa, Artificial
  IGFBP-2 heparin binding domain-containing peptide sequence
HRHVGINNPHH

SEQ ID NO: 8654 - protein, 11 aa, Artificial
  IGFBP-2 heparin binding domain-containing peptide sequence
KHKVGINNPHH

SEQ ID NO: 8655 - protein, 11 aa, Artificial
  IGFBP-2 heparin binding domain-containing peptide sequence
RHKVGINNPHH

SEQ ID NO: 8656 - protein, 11 aa, Artificial
  IGFBP-2 heparin binding domain-containing peptide sequence
HHKVGINNPHH

SEQ ID NO: 8657 - protein, 11 aa, Artificial
  IGFBP-2 heparin binding domain-containing peptide sequence
KKKVGINNPHH

SEQ ID NO: 8658 - protein, 11 aa, Artificial
  IGFBP-2 heparin binding domain-containing peptide sequence
RKKVGINNPHH

SEQ ID NO: 8659 - protein, 11 aa, Artificial
  IGFBP-2 heparin binding domain-containing peptide sequence
HKKVGINNPHH

SEQ ID NO: 8660 - protein, 11 aa, Artificial
  IGFBP-2 heparin binding domain-containing peptide sequence
KRKVGINNPHH

SEQ ID NO: 8661 - protein, 11 aa, Artificial
  IGFBP-2 heparin binding domain-containing peptide sequence
RRKVGINNPHH

SEQ ID NO: 8662 - protein, 11 aa, Artificial
  IGFBP-2 heparin binding domain-containing peptide sequence
HRKVGINNPHH

SEQ ID NO: 8663 - protein, 11 aa, Artificial
  IGFBP-2 heparin binding domain-containing peptide sequence
KHRVGINNPHH

SEQ ID NO: 8664 - protein, 11 aa, Artificial
  IGFBP-2 heparin binding domain-containing peptide sequence
RHRVGINNPHH

SEQ ID NO: 8665 - protein, 11 aa, Artificial
  IGFBP-2 heparin binding domain-containing peptide sequence
HHRVGINNPHH

SEQ ID NO: 8666 - protein, 11 aa, Artificial
  IGFBP-2 heparin binding domain-containing peptide sequence
KKRVGINNPHH

SEQ ID NO: 8667 - protein, 11 aa, Artificial
  IGFBP-2 heparin binding domain-containing peptide sequence
RKRVGINNPHH

SEQ ID NO: 8668 - protein, 11 aa, Artificial
  IGFBP-2 heparin binding domain-containing peptide sequence
HKRVGINNPHH

SEQ ID NO: 8669 - protein, 11 aa, Artificial
  IGFBP-2 heparin binding domain-containing peptide sequence
KRRVGINNPHH

SEQ ID NO: 8670 - protein, 11 aa, Artificial
  IGFBP-2 heparin binding domain-containing peptide sequence
RRRVGINNPHH

SEQ ID NO: 8671 - protein, 11 aa, Artificial
  IGFBP-2 heparin binding domain-containing peptide sequence
HRRVGINNPHH

SEQ ID NO: 8672 - protein, 11 aa, Artificial
  IGFBP-2 heparin binding domain-containing peptide sequence
KHHLGVNNPHH

SEQ ID NO: 8673 - protein, 11 aa, Artificial
  IGFBP-2 heparin binding domain-containing peptide sequence
RHHLGVNNPHH

SEQ ID NO: 8674 - protein, 11 aa, Artificial
  IGFBP-2 heparin binding domain-containing peptide sequence
HHHLGVNNPHH

SEQ ID NO: 8675 - protein, 11 aa, Artificial
  IGFBP-2 heparin binding domain-containing peptide sequence
KKHLGVNNPHH

SEQ ID NO: 8676 - protein, 11 aa, Artificial
  IGFBP-2 heparin binding domain-containing peptide sequence
RKHLGVNNPHH

SEQ ID NO: 8677 - protein, 11 aa, Artificial
  IGFBP-2 heparin binding domain-containing peptide sequence
HKHLGVNNPHH

SEQ ID NO: 8678 - protein, 11 aa, Artificial
  IGFBP-2 heparin binding domain-containing peptide sequence
KRHLGVNNPHH

SEQ ID NO: 8679 - protein, 11 aa, Artificial
  IGFBP-2 heparin binding domain-containing peptide sequence
RRHLGVNNPHH

SEQ ID NO: 8680 - protein, 11 aa, Artificial
  IGFBP-2 heparin binding domain-containing peptide sequence
HRHLGVNNPHH

SEQ ID NO: 8681 - protein, 11 aa, Artificial
  IGFBP-2 heparin binding domain-containing peptide sequence
KHKLGVNNPHH

SEQ ID NO: 8682 - protein, 11 aa, Artificial
  IGFBP-2 heparin binding domain-containing peptide sequence
RHKLGVNNPHH

SEQ ID NO: 8683 - protein, 11 aa, Artificial
  IGFBP-2 heparin binding domain-containing peptide sequence
HHKLGVNNPHH

SEQ ID NO: 8684 - protein, 11 aa, Artificial
  IGFBP-2 heparin binding domain-containing peptide sequence
KKKLGVNNPHH

SEQ ID NO: 8685 - protein, 11 aa, Artificial
  IGFBP-2 heparin binding domain-containing peptide sequence
RKKLGVNNPHH

SEQ ID NO: 8686 - protein, 11 aa, Artificial
  IGFBP-2 heparin binding domain-containing peptide sequence
HKKLGVNNPHH

SEQ ID NO: 8687 - protein, 11 aa, Artificial
  IGFBP-2 heparin binding domain-containing peptide sequence
KRKLGVNNPHH

SEQ ID NO: 8688 - protein, 11 aa, Artificial
  IGFBP-2 heparin binding domain-containing peptide sequence
RRKLGVNNPHH

SEQ ID NO: 8689 - protein, 11 aa, Artificial
  IGFBP-2 heparin binding domain-containing peptide sequence
HRKLGVNNPHH

SEQ ID NO: 8690 - protein, 11 aa, Artificial
  IGFBP-2 heparin binding domain-containing peptide sequence
KHRLGVNNPHH

SEQ ID NO: 8691 - protein, 11 aa, Artificial
  IGFBP-2 heparin binding domain-containing peptide sequence
RHRLGVNNPHH

SEQ ID NO: 8692 - protein, 11 aa, Artificial
  IGFBP-2 heparin binding domain-containing peptide sequence
HHRLGVNNPHH

SEQ ID NO: 8693 - protein, 11 aa, Artificial
  IGFBP-2 heparin binding domain-containing peptide sequence
KKRLGVNNPHH

SEQ ID NO: 8694 - protein, 11 aa, Artificial
  IGFBP-2 heparin binding domain-containing peptide sequence
RKRLGVNNPHH

SEQ ID NO: 8695 - protein, 11 aa, Artificial
  IGFBP-2 heparin binding domain-containing peptide sequence
HKRLGVNNPHH

SEQ ID NO: 8696 - protein, 11 aa, Artificial
  IGFBP-2 heparin binding domain-containing peptide sequence
KRRLGVNNPHH

SEQ ID NO: 8697 - protein, 11 aa, Artificial
  IGFBP-2 heparin binding domain-containing peptide sequence
RRRLGVNNPHH

SEQ ID NO: 8698 - protein, 11 aa, Artificial
  IGFBP-2 heparin binding domain-containing peptide sequence
HRRLGVNNPHH

SEQ ID NO: 8699 - protein, 11 aa, Artificial
  IGFBP-2 heparin binding domain-containing peptide sequence
KHHIGVNNPHH

SEQ ID NO: 8700 - protein, 11 aa, Artificial
  IGFBP-2 heparin binding domain-containing peptide sequence
RHHIGVNNPHH

SEQ ID NO: 8701 - protein, 11 aa, Artificial
  IGFBP-2 heparin binding domain-containing peptide sequence
HHHIGVNNPHH

SEQ ID NO: 8702 - protein, 11 aa, Artificial
  IGFBP-2 heparin binding domain-containing peptide sequence
KKHIGVNNPHH

SEQ ID NO: 8703 - protein, 11 aa, Artificial
  IGFBP-2 heparin binding domain-containing peptide sequence
RKHIGVNNPHH

SEQ ID NO: 8704 - protein, 11 aa, Artificial
  IGFBP-2 heparin binding domain-containing peptide sequence
HKHIGVNNPHH

SEQ ID NO: 8705 - protein, 11 aa, Artificial
  IGFBP-2 heparin binding domain-containing peptide sequence
KRHIGVNNPHH

SEQ ID NO: 8706 - protein, 11 aa, Artificial
  IGFBP-2 heparin binding domain-containing peptide sequence
RRHIGVNNPHH

SEQ ID NO: 8707 - protein, 11 aa, Artificial
  IGFBP-2 heparin binding domain-containing peptide sequence
HRHIGVNNPHH

SEQ ID NO: 8708 - protein, 11 aa, Artificial
  IGFBP-2 heparin binding domain-containing peptide sequence
KHKIGVNNPHH

SEQ ID NO: 8709 - protein, 11 aa, Artificial
  IGFBP-2 heparin binding domain-containing peptide sequence
RHKIGVNNPHH

SEQ ID NO: 8710 - protein, 11 aa, Artificial
  IGFBP-2 heparin binding domain-containing peptide sequence
HHKIGVNNPHH

SEQ ID NO: 8711 - protein, 11 aa, Artificial
  IGFBP-2 heparin binding domain-containing peptide sequence
KKKIGVNNPHH

SEQ ID NO: 8712 - protein, 11 aa, Artificial
  IGFBP-2 heparin binding domain-containing peptide sequence
RKKIGVNNPHH

SEQ ID NO: 8713 - protein, 11 aa, Artificial
  IGFBP-2 heparin binding domain-containing peptide sequence
HKKIGVNNPHH

SEQ ID NO: 8714 - protein, 11 aa, Artificial
  IGFBP-2 heparin binding domain-containing peptide sequence
KRKIGVNNPHH

SEQ ID NO: 8715 - protein, 11 aa, Artificial
  IGFBP-2 heparin binding domain-containing peptide sequence
RRKIGVNNPHH

SEQ ID NO: 8716 - protein, 11 aa, Artificial
  IGFBP-2 heparin binding domain-containing peptide sequence
HRKIGVNNPHH

SEQ ID NO: 8717 - protein, 11 aa, Artificial
  IGFBP-2 heparin binding domain-containing peptide sequence
KHRIGVNNPHH

SEQ ID NO: 8718 - protein, 11 aa, Artificial
  IGFBP-2 heparin binding domain-containing peptide sequence
RHRIGVNNPHH

SEQ ID NO: 8719 - protein, 11 aa, Artificial
  IGFBP-2 heparin binding domain-containing peptide sequence
HHRIGVNNPHH

SEQ ID NO: 8720 - protein, 11 aa, Artificial
  IGFBP-2 heparin binding domain-containing peptide sequence
KKRIGVNNPHH

SEQ ID NO: 8721 - protein, 11 aa, Artificial
  IGFBP-2 heparin binding domain-containing peptide sequence
RKRIGVNNPHH

SEQ ID NO: 8722 - protein, 11 aa, Artificial
  IGFBP-2 heparin binding domain-containing peptide sequence
HKRIGVNNPHH

SEQ ID NO: 8723 - protein, 11 aa, Artificial
  IGFBP-2 heparin binding domain-containing peptide sequence
KRRIGVNNPHH

SEQ ID NO: 8724 - protein, 11 aa, Artificial
  IGFBP-2 heparin binding domain-containing peptide sequence
RRRIGVNNPHH

SEQ ID NO: 8725 - protein, 11 aa, Artificial
  IGFBP-2 heparin binding domain-containing peptide sequence
HRRIGVNNPHH

SEQ ID NO: 8726 - protein, 11 aa, Artificial
  IGFBP-2 heparin binding domain-containing peptide sequence
KHHVGVNNPHH

SEQ ID NO: 8727 - protein, 11 aa, Artificial
  IGFBP-2 heparin binding domain-containing peptide sequence
RHHVGVNNPHH

SEQ ID NO: 8728 - protein, 11 aa, Artificial
  IGFBP-2 heparin binding domain-containing peptide sequence
HHHVGVNNPHH

SEQ ID NO: 8729 - protein, 11 aa, Artificial
  IGFBP-2 heparin binding domain-containing peptide sequence
KKHVGVNNPHH

SEQ ID NO: 8730 - protein, 11 aa, Artificial
  IGFBP-2 heparin binding domain-containing peptide sequence
RKHVGVNNPHH

SEQ ID NO: 8731 - protein, 11 aa, Artificial
  IGFBP-2 heparin binding domain-containing peptide sequence
HKHVGVNNPHH

SEQ ID NO: 8732 - protein, 11 aa, Artificial
  IGFBP-2 heparin binding domain-containing peptide sequence
KRHVGVNNPHH

SEQ ID NO: 8733 - protein, 11 aa, Artificial
  IGFBP-2 heparin binding domain-containing peptide sequence
RRHVGVNNPHH

SEQ ID NO: 8734 - protein, 11 aa, Artificial
  IGFBP-2 heparin binding domain-containing peptide sequence
HRHVGVNNPHH

SEQ ID NO: 8735 - protein, 11 aa, Artificial
  IGFBP-2 heparin binding domain-containing peptide sequence
KHKVGVNNPHH

SEQ ID NO: 8736 - protein, 11 aa, Artificial
  IGFBP-2 heparin binding domain-containing peptide sequence
RHKVGVNNPHH

SEQ ID NO: 8737 - protein, 11 aa, Artificial
  IGFBP-2 heparin binding domain-containing peptide sequence
HHKVGVNNPHH

SEQ ID NO: 8738 - protein, 11 aa, Artificial
  IGFBP-2 heparin binding domain-containing peptide sequence
KKKVGVNNPHH

SEQ ID NO: 8739 - protein, 11 aa, Artificial
  IGFBP-2 heparin binding domain-containing peptide sequence
RKKVGVNNPHH

SEQ ID NO: 8740 - protein, 11 aa, Artificial
  IGFBP-2 heparin binding domain-containing peptide sequence
HKKVGVNNPHH

SEQ ID NO: 8741 - protein, 11 aa, Artificial
  IGFBP-2 heparin binding domain-containing peptide sequence
KRKVGVNNPHH

SEQ ID NO: 8742 - protein, 11 aa, Artificial
  IGFBP-2 heparin binding domain-containing peptide sequence
RRKVGVNNPHH

SEQ ID NO: 8743 - protein, 11 aa, Artificial
  IGFBP-2 heparin binding domain-containing peptide sequence
HRKVGVNNPHH

SEQ ID NO: 8744 - protein, 11 aa, Artificial
  IGFBP-2 heparin binding domain-containing peptide sequence
KHRVGVNNPHH

SEQ ID NO: 8745 - protein, 11 aa, Artificial
  IGFBP-2 heparin binding domain-containing peptide sequence
RHRVGVNNPHH

SEQ ID NO: 8746 - protein, 11 aa, Artificial
  IGFBP-2 heparin binding domain-containing peptide sequence
HHRVGVNNPHH

SEQ ID NO: 8747 - protein, 11 aa, Artificial
  IGFBP-2 heparin binding domain-containing peptide sequence
KKRVGVNNPHH

SEQ ID NO: 8748 - protein, 11 aa, Artificial
  IGFBP-2 heparin binding domain-containing peptide sequence
RKRVGVNNPHH

SEQ ID NO: 8749 - protein, 11 aa, Artificial
  IGFBP-2 heparin binding domain-containing peptide sequence
HKRVGVNNPHH

SEQ ID NO: 8750 - protein, 11 aa, Artificial
  IGFBP-2 heparin binding domain-containing peptide sequence
KRRVGVNNPHH

SEQ ID NO: 8751 - protein, 11 aa, Artificial
  IGFBP-2 heparin binding domain-containing peptide sequence
RRRVGVNNPHH

SEQ ID NO: 8752 - protein, 11 aa, Artificial
  IGFBP-2 heparin binding domain-containing peptide sequence
HRRVGVNNPHH

1. A compound comprising a peptide having the amino acid sequence KHHLGLEEPKKLR, a peptide having the amino acid sequence KHHLGLEEPKK, a peptide having the amino acid sequence HLGLEEPKKLR, an analog of any thereof, a prodrug of any thereof, or a pharmaceutically acceptable salt of any thereof.

2. A compound of Formula I:
X—Y—R¹R²R³R⁴R⁵R⁶R⁷R⁸R⁹R¹⁰R¹¹R¹²R¹³—Y′—X′ (I)
wherein:
X is present or absent and when present is a capping group, a polyalkylene oxide, or a peptide consisting of from 2 to 6 or 10 additional amino acids of any type, which peptide is optionally terminated by a capping group or polyalkylene oxide;
Y is present or absent and when present is a linking group;
R¹ is present or absent and when present is a positively charged (at pH 6.0) amino acid;
R² is present or absent and when present is a positively charged (at pH 6.0) amino acid;
R³ is any amino acid;
R⁴ is any amino acid;
R⁵ is any amino acid;
R⁶ is any amino acid;
R⁷ is any amino acid;
R⁸ is any amino acid;
R⁹ is any amino acid;
R¹⁰ is a positively charged (at pH 6.0) amino acid;
R¹¹ is a positively charged (at pH 6.0) amino acid;
R¹² is present or absent and when present is any amino acid;
R¹³ is present or absent and when present is a positively charged (at pH 6.0) amino acid;
Y′ is present or absent and when present is a linking group; and
X′ is present or absent and when present is a capping group, a polyalkylene oxide, or a peptide consisting of from 2 to 6 or 10 additional amino acids, which peptide is optionally terminated by a capping group or polyalkylene oxide;
or a pharmaceutically acceptable salt thereof.

3. The compound of claim 2, wherein R¹ when present is an amino acid selected from the group consisting of K, R and H;
wherein R² when present is an amino acid selected from the group consisting of K, R and H;
wherein R³ is a positively charged (at pH 6.0) amino acid;
wherein R⁴ is an amino acid with a nonpolar side chain;
wherein R⁵ is G;
wherein R⁶ is an amino acid with a nonpolar side chain;
wherein R⁷ is an amino acid selected from the group consisting of E and N;
wherein R⁸ is an amino acid selected from the group consisting of E and N;
wherein R⁹ is P;
wherein R¹⁰ is an amino acid selected from the group consisting of K, R and H;
wherein R¹¹ is an amino acid selected from the group consisting of K, R and H;
wherein R¹² when present is an amino acid with a nonpolar side chain; and/or
wherein R¹³ when present is an amino acid selected from the group consisting of K, R and H, in any combination.

4. A composition comprising the compound of claim 1 in combination with a pharmaceutically acceptable carrier.

5. The composition of claim 4, wherein said carrier is a liquid carrier.

6. The composition of claim 4, wherein said carrier is a biomedical implant.

7. The composition of claim 4, further comprising at least one additional active agent selected from the group consisting of bone resorption inhibitors and weight control agents.

8. A method for enhancing bone formation and inhibiting bone resorption simultaneously in a subject in need thereof, comprising administering to the subject the compound of claim 1 in an amount effective to enhance bone formation and inhibit bone resorption simultaneously in said subject.

9. A method for inducing deposition and maturation of bone in a subject having a compromised bone condition, comprising administering to said subject the compound of claim 1 in an amount effective to induce deposition and maturation of bone in said subject.

10. The method of claim 9, wherein said compromised bone condition is at a targeted site of said subject.

11. The method of claim 10, wherein the targeted site is selected from the group consisting of an intervertebral space, a facet joint, a site of a bone fracture, a bone of the mouth, a bone of the chin, a bone of the jaw, an implant site and any combination thereof.

12. The method of claim 8, wherein said administration is selected from the group consisting of intrathecal administration, subcutaneous administration, cutaneous administration, oral administration intravenous administration, intraperitoneal administration, intramuscular administration, administration via an implant, administration via a matrix, administration via a gel, and any combination thereof.

13. The method of claim 9, wherein the condition is selected from the group consisting of a broken bone, a bone defect, a bone transplant, a bone graft, bone cancer, a joint replacement, a joint repair, a fusion, a facet repair, a bone degeneration, a dental implant, a dental repair, a bone marrow deficit and any combination thereof.

14. The method of claim 13, wherein the bone defect is a gap, deformation or a nonunion fracture in a bone.

15. The method of claim 13, wherein the bone degeneration is due to osteopenia or osteoporosis.

16. The method of claim 13, wherein the bone defect is due to dwarfism.

17. The method of claim 13, wherein the joint replacement is of a joint selected from the group consisting of a vertebral joint, a knee joint, a hip joint, a tarsal joint, a phalangeal joint, an elbow joint, a shoulder joint, an ankle joint, a wrist joint, a sacroiliac joint and any combination thereof.

18. The method of claim 13, wherein the joint repair is of a joint selected from the group consisting of a vertebral joint, a knee joint, a hip joint, a tarsal joint, a phalangeal joint, an elbow joint, a shoulder joint, an ankle joint, a wrist joint, a sacroiliac joint and any combination thereof.

19. The method of claim 13, further comprising administering a bone resorption inhibitor to said subject in an effective amount.

20. A method for controlling body weight in a subject in need thereof, comprising administering to said subject the compound of claim 1 in an amount effective to control body weight.

21. The method of claim 20, wherein said compound is administered in an amount effective to reduce weight gain or induce weight loss in said subject.

22. The method of claim 20, wherein said compound is administered in an amount effective to reduce the body mass index of said subject.

23. The method of claim 22, wherein said subject has a body mass index of at least about 25 kg/m².

24. The method of claim 22, wherein said subject has a body mass index of at least about 30 kg/m².

25. The method of claim 20, wherein said administering is continued for a period of at least about 16 weeks or at least about 24 weeks.

26. The method of claim 20, wherein said administering is continued until said subject has achieved at least 5% weight loss or said subject's body mass index is reduced to less than about 25 kg/m².

27. The method of claim 20, wherein said compound is administered in an amount effective to induce fat loss in said subject.

28. The method of claim 20, wherein said compound is administered in an amount effective to inhibit fat cell differentiation in said subject.

29. The method of claim 20, further comprising administering to said subject a weight control agent.

30. The method of claim 29, wherein said weight control agent is selected from the group consisting of an appetite suppressant, a lipase inhibitor, an antidepressant, an anti-seizure agent and any combination thereof.

31. A method for improving bone marrow reconstitution in a subject in need thereof, comprising administering to said subject the compound of claim 1 in an amount effective to improve bone marrow reconstitution.

32. A method of expanding stem cells ex vivo, comprising contacting the compound of claim 1 with stem cells from a subject, wherein said stem cells are maintained under conditions whereby they are reintroduced into the subject.

33. The method of claim 31, wherein the subject is selected from the group consisting of: a subject having or who has had chemotherapy, a subject having or who has had radiation, a subject having aplastic anemia, a subject having myelodysplasia, and any combination thereof.

34.-35. (canceled)

36. The method of claim 32, wherein the subject is selected from the group consisting of: a subject having or who has had chemotherapy, a subject having or who has had radiation, a subject having aplastic anemia, a subject having myelodysplasia, and any combination thereof.
